(19) United States
(12) Patent Application Publication
(10) Pub. No.: US 2010/0132071 A1
(43) Pub. Date: May 27, 2010

(54) Plants Having Enhanced Yield-Related Traits And A Method For Making The Same

(75) Inventors: Yves Hatzfeld, Lille (FR); Ana Isabel Sanz Molinero, Gentbrugge (BE); Amber Shirley, Durham, NC (US); Lalitree Darnielle, Durham, NC (US); Valerie Frankard, Waterloo (BE); Steven Vandenabeele, Oudenaarde (BE); Bryan McKersie, Raleigh, NC (US)

Correspondence Address: CONNOLLY BOVE LODGE & HUTZ, LLP, P O BOX 2207, WILMINGTON, DE, 19899, US

(73) Assignee: BASF Plant Science GmbH, Ludwigshafen (DE)

(21) Appl. No.: 12/598,055

(22) PCT Filed: May 2, 2008
(86) PCT No.: PCT/US08/05732

§ 371 Date: Oct. 29, 2009

Related U.S. Application Data
(60) Provisional application No. 60/916,575, filed on May 8, 2007.
(60) Provisional application No. 60/942,214, filed on Jun. 6, 2007.
(60) Provisional application No. 60/937,989, filed on Jun. 29, 2007.
(60) Provisional application No. 60/948,036, filed on Jul. 5, 2007.

(30) Foreign Application Priority Data
May 3, 2007 (EP) 07107448.8
May 29, 2007 (EP) 07109052.6
May 29, 2007 (EP) 07109068.2
Jun. 11, 2007 (EP) 07109961.8
Jun. 19, 2007 (EP) 07110548.0
Jun. 19, 2007 (EP) 07110557.1

(51) Int. Cl. C12N 15/82; C12N 15/29; C07K 14/415; A01H 5/00; A01H 5/10

(52) U.S. Cl. 800/290; 800/278; 536/23.6; 530/370; 800/298; 435/320.1; 800/320.2; 800/320.1; 800/320; 800/320.3

(57) ABSTRACT

The present invention relates generally to the field of molecular biology and concerns a method for enhancing yield-related traits and/or improving various plant growth characteristics by modulating expression in a plant of a nucleic acid encoding a GRP (Growth Regulating Protein). The GRP is selected from a LOB-domain comprising protein (LOB: Lateral Organ Boundaries), herein abbreviated as LBD polypeptide, a JMJC (JUMONJI-C) polypeptide, a CKI (Casein Kinase I) polypeptide, a bHLH11-like (basic Helix-Loop-Helix 11) protein, a plant homeodomain finger-homeodomain (PHDf-HD) polypeptide, an ASR (abscisic acid-, stress-, and ripening-induced) polypeptide and/or a Squamosa promoter binding protein-like 1 1 (SPL11) transcription factor polypeptide. The present invention also concerns plants having modulated expression of a nucleic acid encoding a GRP, which plants have improved growth characteristics relative to corresponding wild type plants or other control plants. The invention also provides novel GRP nucleic acids and GRP polypeptides as well as constructs useful in the methods of the invention.

[0001] The present invention relates generally to the field of molecular biology and concerns a method for enhancing yield-related traits and/or improving various plant growth characteristics by modulating expression in a plant of a nucleic acid encoding a GRP (Growth Regulating Protein). The GRP is selected from a LOB-domain comprising protein (LOB: Lateral Organ Boundaries), herein abbreviated as LBD polypeptide, a JMJC (JUMONJI-C) polypeptide, a CKI (Casein Kinase I) polypeptide, a bHLH11-like (basic Helix-Loop-Helix 11) protein, a plant homeodomain finger-homeodomain (PHDf-HD) polypeptide, an ASR (abscisic acid-, stress-, and ripening-induced) polypeptide and/or a Squamosa promoter binding protein-like 11 (SPL11) transcription factor polypeptide. The present invention also concerns plants having modulated expression of a nucleic acid encoding a GRP, which plants have improved growth characteristics relative to corresponding wild type plants or other control plants. The invention also provides novel GRP nucleic acids and GRP polypeptides as well as constructs useful in the methods of the invention.

[0002] The ever-increasing world population and the dwindling supply of arable land available for agriculture fuels research towards increasing the efficiency of agriculture; Conventional means for crop and horticultural improvements utilise selective breeding techniques to identify plants having desirable characteristics. However, such selective breeding techniques have several drawbacks, namely that these techniques are typically labour intensive and result in plants that often contain heterogeneous genetic components that may not always result in the desirable trait being passed on from parent plants. Advances in molecular biology have allowed mankind to modify the germplasm of animals and plants. Genetic engineering of plants entails the isolation and manipulation of genetic material (typically in the form of DNA or RNA) and the subsequent introduction of that genetic material into a plant. Such technology has the capacity to deliver crops or plants having various improved economic, agronomic or horticultural traits.

[0003] A trait of particular economic interest is increased yield. Yield is normally defined as the measurable produce of economic value from a crop. This may be defined in terms of quantity and/or quality. Yield is directly dependent on several factors, for example, the number and size of the organs, plant architecture (for example, the number of branches), seed production, leaf senescence and more. Root development, nutrient uptake, stress tolerance and early vigour may also be important factors in determining yield. Optimizing the above-mentioned factors may therefore contribute to increasing crop yield.

[0004] Seed yield is a particularly important trait, since the seeds of many plants are important for human and animal nutrition. Crops such as corn, rice, wheat, canola and soybean account for over half the total human caloric intake, whether through direct consumption of the seeds themselves or through consumption of meat products raised on processed seeds. They are also a source of sugars, oils and many kinds of metabolites used in industrial processes. Seeds contain an embryo (the source of new shoots and roots) and an endosperm (the source of nutrients for embryo growth during germination and during early growth of seedlings). The development of a seed involves many genes, and requires the transfer of metabolites from the roots, leaves and stems into the growing seed. The endosperm, in particular, assimilates the metabolic precursors of carbohydrates, oils and proteins and synthesizes them into storage macromolecules to fill out the grain.

[0005] Another important trait for many crops is early vigour. Improving early vigour is an important objective of modern rice breeding programs in both temperate and tropical rice cultivars. Long roots are important for proper soil anchorage in water-seeded rice. Where rice is sown directly into flooded fields, and where plants must emerge rapidly through water, longer shoots are associated with vigour. Where drill-seeding is practiced, longer mesocotyls and coleoptiles are important for good seedling emergence. The ability to engineer early vigour into plants would be of great importance in agriculture. For example, poor early vigor has been a limitation to the introduction of maize (Zea mays L.) hybrids based on Corn Belt germplasm in the European Atlantic.

[0006] A further important trait is that of improved abiotic stress tolerance. Abiotic stress is a primary cause of crop loss worldwide, reducing average yields for most major crop plants by more than 50% (Wang et al., Planta (2003) 218: 1-14). Abiotic stresses may be caused by drought, salinity, extremes of temperature, chemical toxicity and oxidative stress. The ability to improve plant tolerance to abiotic stress would be of great economic advantage to farmers worldwide and would allow for the cultivation of crops during adverse conditions and in territories where cultivation of crops may not otherwise be possible.

[0007] Crop yield may therefore be increased by optimising one of the above-mentioned factors.

[0008] Depending on the end use, the modification of certain yield traits may be favoured over others. For example for applications such as forage or wood production, or bio-fuel resource, an increase in the vegetative parts of a plant may be desirable, and for applications such as flour, starch or oil production, an increase in seed parameters may be particularly desirable. Even amongst the seed parameters, some may be favoured over others, depending on the application. Various mechanisms may contribute to increasing seed yield, whether that is in the form of increased seed size or increased seed number.

[0009] One approach to increasing yield (seed yield and/or biomass) in plants may be through modification of the inherent growth mechanisms of a plant, such as the cell cycle or various signalling pathways involved in plant growth or in defense mechanisms.

[0010] Surprisingly, it has now been found that modulating expression of a nucleic acid encoding a GRP polypeptide selected from a LOB-domain comprising protein (LOB: Lateral Organ Boundaries), herein abbreviated as LBD polypeptide, a JMJC (JUMONJI-C) polypeptide, a casein kinase polypeptide, a plant homeodomain finger-homeodomain (PHDf-HD) polypeptide, a bHLH11-like (basic Helix-Loop-Helix 11) protein, an ASR (abscisic acid-, stress-, and ripening-induced) polypeptide and/or a Squamosa promoter binding protein-like 11 (SPL11) transcription factor polypeptide gives plants having enhanced yield-related traits and/or improved various plant growth characteristics relative to control plants.

[0011] According one embodiment, there is provided a method for improving or enhancing yield related traits and/or improving various plant growth characteristics of a plant relative to control plants, comprising modulating expression of a nucleic acid encoding a GRP polypeptide selected from a LOB-domain comprising protein (LOB: Lateral Organ Boundaries), herein abbreviated as LBD polypeptide, a JMJC (JUMONJI-C) polypeptide, a casein kinase polypeptide, a plant homeodomain finger-homeodomain (PHDf-HD) polypeptide, a bHLH11-like (basic Helix-Loop-Helix 11) protein, an ASR (abscisic acid-, stress-, and ripening-induced) polypeptide and/or a Squamosa promoter binding protein-like 11 (SPL11) transcription factor polypeptide in a plant.

### BACKGROUND

### 1. LOB-Domain Comprising Protein (LOB: Lateral Organ Boundaries)

[0012] LBD proteins (or LOB domain proteins) all share a conserved domain in the N-terminal region, known as the LOB domain. LOB domain proteins (Shuai et al., Plant Physiol. 129, 747-761, 2002) are found in various plant species and constitute a large gene family: Arabidopsis is reported to possess more than 40 genes encoding LOB domain proteins, at least 35 genes are found in rice and at least 15 genes in maize. LBD polypeptides may be regulators of transcription factors (among which KNOX transcription factors) and are postulated to play a role in tassel and ear branching in maize (Bortiri et al., Plant Cell 18, 574-587, 2006), formation of adventitious roots (Liu et al., Plant J. 43, 47-56, 2005; Inukai et al., Plant Cell 17, 1387-1396, 2005), proliferation of the female gametophyte (Evans et al., Plant Cell 19, 46-62, 2007), proximal-distal patterning in petals (Chalfun-Junior et al, Plant Mol. Biol. 57, 559-575, 2005); leaf morphology and venation (Iwakawa et al., Plant Cell Physiol. 43, 467-478, 2002). Yang et al. (Molecular Phylogenetics and Evolution 39, 248-262, 2006) discriminated three classes of LBD proteins in rice, based on the classification of Iwakawa et al. (2005) and Shuai et al. (2002). Modulation of class I LOB gene expression (up or downregulation of expression) often results in pleiotropic effects, leading to abnormal plant shape and infertility. For example, US20060218674 discloses a method for increasing the size of the endosperm in a plant seed by expressing a class I LOB polypeptide, however the size of the embryo decreased proportionally.

[0013] Surprisingly, it has now been found that modulating expression of a nucleic acid encoding a LBD polypeptide gives plants having enhanced yield-related traits, in particular increased biomass and seed yield, relative to control plants.

[0014] According one embodiment, there is provided a method for improving yield related traits of a plant relative to control plants, comprising modulating expression of a nucleic acid encoding a LBD polypeptide in a plant. The improved yield related traits comprised increased biomass and increased seed yield.

### II. JMJC (JUMONJI-C) Polypeptide

[0015] The first reported JUMONJI (which means cruciform in Japanese) gene was identified by gene trapping in mice where it plays an essential role in the development of multiple tissues. To date JUMONJI polypeptides constitute a distinct class of proteins found in prokaryotes as well as in eukaryotes including bacteria, fungi and plants.

[0016] Most members of the JUMONJI polypeptide family are characterized by the presence of a JmjC or JUMONJI-C domain. It is hypothesized that during evolution ancient proteins comprising only on JmjC domain acquired additional domains broadening the spectrum of JMJC polypeptides found in nature. Of particular interest are those JMJC polypeptides that have acquired conserved domains involved in DNA, RNA, and protein binding such as zinc fingers, FY-rich, RING finger protein and F-box domains, suggesting that polypeptides of the JUMONJI family may regulate transcription, chromatin function and/or protein turnover. Accordingly many JUMONJI proteins in animals have been reported to affect development by controlling gene expression and chromatin activity. For example a mouse JUMONJI gene acts to repress cyclin D1 in embryos and this activity is required for normal cardiogenesis (Toyoda et al. 2003 Dev Cell. 5(1):85-97.).

[0017] Much progress has been made on the understanding of the mode of action of jmjC domain containing proteins. Crucial to their biological function may be some of the recently revealed enzymatic activities in JMJC polypeptides, for example JHDM1, a JMJC polypeptide of human origin (Tsukada, Nature. 2006; 439(7078):811-6) has histone dimethylase activity, and asparaginyl hydroxylase activity has been reported in FIH (Factor Inhibiting HIF-1alpha), a transcription factor involved in cellular response to hypoxia, (Linke et al. (2004) J. Biol. Chem., Vol. 279, 14391-14397).

[0018] JmjC domains typically have structures resembling those found in some metalloenzymes. Recent structural analysis of the JmjC domain present in the JUMONJI protein FIH revealed the amino acid residues involved in binding to the cofactors 2-oxoglutarate and iron Fe (II) (Dann et al; Proc Natl Acad Sci USA. 2002; 99(24): 15351-15356). FIH has the HXD/E iron-binding motif characteristic of most of the 2-oxoglutarate oxygenases. In addition and consistent with the hydrolase activity, FIH secondary structure is composed of a beta-strand jellyroll core that surrounds the Fe(II)-binding site. These features are conserved amongst JmjC domain containing proteins (Trewick et al. EMBO Rep. 2005 (4):315-20).

[0019] In plants, two JMJC polypeptides are reportedly involved in the control of flowering time. They both act as repressors of flowering pathways in Arabidopsis thaliana (Noh et al. Plant Cell. 2004. 16(10):2601-13). Enzymatic activity for the plant proteins has not yet been experimentally determined.

[0020] Surprisingly, it has now been found that modulating expression in a plant of a nucleic acid encoding a JUMONJI-C or JMJC polypeptide gives plants having enhanced yield-related traits, in particular increased yield relative to control plants.

[0021] According to one embodiment, there is provided a method for improving yield-related traits of a plant relative to control plants, comprising modulating expression of a nucleic acid encoding a JMJC polypeptide in a plant. The improved yield related traits comprise one or more of increased total seed weight per plant, thousand-kernel (1000-seed) weight, seed filling rate, harvest index, early vigour, and root/shoot index, both under optimal growth conditions and suboptimal, mild drought conditions.

### III. Casein Kinase I

[0022] Protein kinases represent a superfamily, and the members of this superfamily catalyze the reversible transfer of a phosphate group of ATP to serine, threonine, and tyrosine amino acid side chains on target polypeptides. In particular, the Casein kinase 1 (CKI) family (EC 2.7.11.1) of protein kinases function as regulators of signal transduction pathways in most eukaryotic organisms. In yeast CKI is involved in the regulation of DNA repair and cell cycle progression (Hoekstra M F et al., Science 253: Brockman J L et al., Proc. Natl Acad. Sci. USA 89: 9454-9458, 1992; Dhillon N and Hoekstra M F, EMBO J. 13: 2777-2788, 1994). Casein kinase I proteins are monomeric serine/threonine type protein kinases that contain a highly conserved central kinase domain. Members of this family have divergent N-terminal and C-terminal extensions. The N-terminal region is responsible for substrate recognition and the C-terminal extension is important for the interaction of the kinase with substrates. The C-terminal extension also is thought to be important for mediating regulation through auto-phosphorylation (Gross and Anderson, 1 998 Cell Signal 10:699-71 1; Craves and Roach, 1 995, J Biol Chem 270:21689-21694).

[0023] In plants several CKI protein family members have been cloned and characterised biochemically (Klimczak and Cashmore A R, 1993. Biochem. J. 293: 283-288; Liu et al. 2003, Plant Journal. 36, 189-202; Lee et al. 2005 Plant Cell. 17(10): 2817-2831. The Arabidopsis genome was found to contain at least 14 Casein Kinase I-like (CKL) genes. Within the conserved kinase domains, the polypeptides shared 89% sequence similarity at the amino acid level. The 14 Arabidopsis CKL isoforms have been further classified in three groups based on the subcellular localization. Group 1 localized predominantly at the cell periphery; group 2 in the nucleus group 3 in the cytoplasm. A Nicotiana tabacum CKI has been localized to plasmodesmata and propose to play a role in cell to cell communication (Lee et al. 2005). Other proposed roles for plant CKI is signal truduction in response to environmental stimuli, root development and plant hormone sensitivity (Liu et al.).

[0024] Surprisingly, it has now been found that modulating expression of a nucleic acid encoding a CKI polypeptide gives plants having enhanced yield-related traits relative to control plants.

[0025] According to one embodiment, there is provided a method for improving yield related traits of a plant relative to control plants, comprising modulating expression of a nucleic acid encoding a CKI polypeptide in a plant. The improved yield related traits comprised one or more of increased biomass, increased emergency vigour, and increased seed yield.

### IV. Plant Homeodomain Finger-Homeodomain (PHDf-HD) Polypeptide

[0026] Transcription factors are usually defined as proteins that show sequence-specific DNA binding affinity and that are capable of activating and/or repressing transcription. The Arabidopsis thaliana genome codes for at least 1533 transcriptional regulators, accounting for ˜5.9% of its estimated total number of genes (Riechmann et al. (2000) Science 290: 2105-2109). The Database of Rice Transcription Factors (DRIP) is a collection of known and predicted transcription factors of Oryza sativa L. ssp. indica and Oryza sativa L. ssp. japonica, and currently contains 2,025 putative transcription factors (TF) gene models in indica and 2,384 in japonica, distributed in 63 families (Gao et al. (2006) Bioinformatics 2006, 22(10):1286-7).

[0027] One of these families is the superfamily of homeodomain (HD) transcription factors involved in many aspects of developmental processes. HD transcription factors are characterized by the presence of a homeodomain (HD), which is a 60-amino acid DNA-binding domain (30). Arabidopsis thaliana and rice contain approximately 100 HD transcription factors, which can be further classified into subfamilies based on amino acid sequence identity (Richardt at al. (2007) Plant Phys 143(4): 1452-1466). Some of these subfamilies are characterized by the presence of additional conserved domains that facilitate DNA binding and/or protein-protein interactions.

[0028] One of these domains is the PHD finger, named plant homeodomain finger (PHDf) due to its association on a same polypeptide with a DNA-binding HD, that was originally identified by amino acid sequence identity between a maize homeobox transcription factor ZmHOX1a (Bellman & Werr (1992) EMBO J. 11:3367-3374) and its Arabidopsis relative ATHAT3.1 (Schindler et al. (1993) Plant J 4: 137-150). The PHDf is a Cys₄-His-Cys₃ zinc-finger-like motif capable of chelating two zinc ions. PHDfs are found in nuclear proteins and are thought to be involved in chromatin-mediated transcriptional regulation (Halbach et al., (2000) Nucleic Acid Res 28(18): 3542-3550).

[0029] Transcriptional factors combining a PHDf and a HD are therefore named PHDf-HDs (Halbach at al. (2000) supra). In plants, such PHDf-HDs are further characterized by the presence of a leucine zipper (ZIP) upstream of the PHDf. Both domains (the ZIP and the PHDf) together form a highly conserved 180 amino acid region called the ZIP/PHDf domain (Halbach at al. (2000) supra).

[0030] Transgenic tobacco plants strongly overexpressing either of two maize PHDf-HD polypeptides (ZmHOX1a or ZmHOX1b) using a cauliflower mosaic virus 35S promoter combined with an omega enhancer, showed identical morphological changes: size reduction, adventitious root formation, and homeotic floral transformations (Uberlacker at al. (1996) Plant Cell 8: 349-362). Transgenic rice and tobacco plants strongly overexpressing Oryza sativa NAZI PHDF-HD polypeptide using cauliflower mosaic virus 35S promoter showed no abnormal growth or phenotypic change compared to wild types (Ito at al. (2004) Gene 331: 9-15).

[0031] In U.S. Pat. No. 7,196,245, an Arabidopsis thaliana PHDf-HD polypeptide (identified as G416) was transformed into Arabidopsis, and shown to promote early flowering in the transgenic plants compared to control plants, with no impact on seed yield.

[0032] Surprisingly, it has now been found that modulating, preferably increasing, expression of a nucleic acid sequence encoding a PHDf-HD polypeptide gives plants having enhanced yield-related traits, preferably enhanced seed yield-related traits, relative to control plants.

[0033] According one embodiment, there is provided a method for enhancing yield-related traits, preferably enhancing seed yield-related traits, in plants relative to control plants, comprising modulating, preferably increasing, expression of a nucleic acid sequence encoding a PHDf-HD polypeptide in a plant. The enhanced yield-related traits, preferably enhanced seed yield-related traits, comprise one or more of: increased number of primary panicles, increased total seed yield per plant, increased number of (filled) seeds, increased thousand kernel weight (TKW), increased harvest index.

V. bHLH11-Like (Basic Helix-Loop-Helix 11) Protein

[0034] Transcription factors are usually defined as proteins that show sequence-specific DNA binding and that are capable of activating and/or repressing transcription. The basic Helix-Loop-Helix transcription factor family is one of the largest families of transcription factors that have been characterised in Arabidopsis thaliana (Toledo-Ortiz et al., Plant Cell 15, 1749-1770, 2003; Bailey et al., Plant Cell 15, 2497-2501, 2003) and in rice (Li et at Plant Physiol. 141, 1167-1184, 2006). The distinguishing characteristic of the bHLH transcription factor family is the presence of a bipartite domain consisting of approximately 60 amino acids. This bipartite domain is comprised of a DNA-binding basic region, which binds to a consensus hexanucleotide E-box and two α-helices separated by a variable loop region, located C-terminally of the basic domain. The two α-helices promote dimerisation, allowing the formation of homo- and heterodimers between different family members. While the bHLH domain is evolutionarily conserved, there is little sequence similarity between clades beyond the domain. Li et al. (2006) classify the rice and Arabidopsis bHLH transcription factors into 22 subfamilies, based on the sequence of the bHLH domains.

[0035] Little is known about the function of bHLH11-like polypeptides in plants. So far, only one bHLH11-like polypeptide, OsPTF1 from rice, has been characterised. OsPTF1 is reported to be involved in tolerance to phosphate starvation (Yi et al., Plant Physiol. 138, 2087-2096). Rice plants overexpressing this gene under control of the 358 promoter did not show any different phenotype compared to control plants when grown under normal conditions, but under conditions of phosphate limitation, the plants had an improved phosphate uptake. Under phosphate limitation, the transgenic plants showed an increase in biomass, phosphate content, increased tillering and increased seed yield.

[0036] Surprisingly, it has now been found that modulating expression I a plant of a nucleic acid encoding a bHLH11-like polypeptide gives plants having enhanced yield-related traits, in particular increased yield relative to control plants. These effects were shown under growth conditions where phosphate was not limiting.

[0037] According one embodiment, there is provided a method for improving yield related traits of a plant relative to control plants, comprising modulating expression of a nucleic acid encoding a bHLH11-like polypeptide in a plant. The improved yield related traits comprised increased seed yield.

### VI. ASR (Abscisic Acid-, Stress-, and Ripening-Induced) Protein

[0038] ASR (abscisic acid-, stress-, and ripening-induced) polypeptides were first identified in tomato (Iusem et al 1993 Plant Physiol 102: 1353-1354) as small highly charged hydrophyllic proteins localized to the nuclei of the cells and bound to chromatin. The Asr gene family encoding ASR polypeptides is found widespread in higher plants and ASR homologs have cloned from a large number of dicot and monocot plants (Carrai et al. 2004 Trends Plant Sci 9: 57-59). Most Asr genes are up-regulated under different environmental stress conditions, during fruit ripening, and upon cellular treatment with the hormone ABA. ASR polypeptides show a high a degree of sequence conservation (Frankel et al. 2006. Gene Pages 74-83). All known Asr genes contain two highly conserved regions. The first region contains a stretch of His residues at the N-terminus, possessing sequence-specific Zn²⁺-dependent DNA binding activity (Kalifa et al., 2004a Biochem J 381: 373-378). The second region is a large part of the C-terminal sequence, often containing a nuclear localization signal NLS (Cakir et al., 2003 Plant Cell 15: 2165-2180). ASR1 protein of tomato is an intrinsically unstructured protein which upon binding of zinc ions, becomes ordered (folded) and forms dimers (Goidgur et al. Plant Physiol. 2007 February; 143(2):617-28)

[0039] A putative role of ASR polypeptides in regulation of gene transcription has been suggested. Reportedly, yeast-one-hybrid experiments revealed that a grape ASR binds to the promoter of a hexose transporter gene (VvHT1). Consistently, a role of Asr1 in the control of hexose uptake in heterotrophic organs such as potato tubers has been suggested (Frankel et al. Plant Mol. Biol. 2007 March; 63(5):719-30). Zinc-dependent DNA binding activity of a protein member of the ASR family has been reported (Kalifa et al. 2004 Biochem J. 2004 Jul. 15; 381(Pt 2):373-8). DNA- and zinc-binding domains of ASR1 protein have been mapped (Rom et al. 2006. Biochimie. 88(6):621-8; Goldgur et al. 2007. Plant Physiol. February; 143(2):617-28).

[0040] The use of ASR polypeptides to improve agronomic traits in plants has been disclosed, as methods to enhance tolerance of plant to particular abiotic stresses. For example, overexpression in Arabidopsis (Arabidopsis thaliana) of the ASR1 ortholog LLA23 gene from lily (Lilium longiflorum) increases the plant tolerance to drought and salinity (Yang et al. 2005. Plant Physiol 139: 836-846). Further, U.S. Pat. No. 7,154,025 discloses methods for increasing resistance to water deficit stress by increasing amount of ASR proteins in a plant.

[0041] Surprisingly, it has now been found that modulating expression in a plant of a nucleic acid encoding an ASR polypeptide gives plants having enhanced yield-related traits under non-stress growth conditions, relative to control plants. According to a first embodiment, the present invention provides a method for enhancing yield-related traits under non-stress growth conditions in plants relative to control plants, comprising modulating expression in a plant of a nucleic acid encoding an ASR polypeptide.

### VII. Squamosa Promoter Binding Protein-Like 11 (SPL11)

[0042] Transcription factor polypeptides are usually defined as proteins that show sequence-specific DNA binding affinity and that are capable of activating and/or repressing transcription. The Squamosa promoter binding protein-like (SPL) transcription factor polypeptides are structurally diverse proteins that share a highly conserved DNA binding domain (DBD) of about 80 amino acid residues in length (Klein et al. (1996) Mol Gen Genet. 259: 7-16; Cardon et al. (1999) Gene 237: 91-104). The SPL transcription factor DNA consensus sequence binding site in the promoter of target genes is 5′-TNCGTACAA-3′ where N represents any base. Within the SPL DBD are ten conserved cysteine (Cys) or histidine (His) residues (see FIG. 28) of which eight are zinc coordinating residues binding two zinc ions necessary for the formation of SPL specific zinc finger tertiary structure (Yamasaki et al. (2004) J Mol Biol 337: 49-63). A second conserved feature within the SPL DBD is a bipartite nuclear localisation signal. Outside of the DBD, a micro RNA (miRNA) target motif, specifically targeted by miR156 family of miRNAs is found in most of the nucleic acid sequences encoding SPL transcription factor polypeptides (either in the coding region, or the 3′ UTR) across the plant kingdom (Rhoades et al. (2002) Cell 110: 513-520). miRNAs control SPL gene expression post-transcriptionally by targeting SPL encoding mRNAs for degradation or by translational repression.

[0043] The Arabidopsis genome codes for at least 1533 transcriptional regulators, accounting for ˜5.9% of its estimated total number of genes (Riechmann et al. (2000) Science 290: 2105-2109). The authors report 16 SPL transcription factor polypeptides in Arabidopsis thaliana, with little sequence similarity among themselves (apart from the abovementioned features), the size of the deduced SPL polypeptide ranging from 131 to 927 amino acids. Nevertheless, pairs of SPL transcription factor polypeptides sharing higher sequence homology were detected within the SPL family of this plant (Cardon et al, (1999)).

[0044] The SPL transcription factor polypeptides (only found in plants) characterized to date have been shown to function in plant development, in particular in flower development. Transgenic plants overexpressing an SPL3 transcription factor polypeptide were reported to flower earlier (Cardon et al. (1997) Plant J 12: 367-377). In European patent application EP1033405, the nucleic acid and deduced polypeptide sequences of the SPL11 transcription factor polypeptide are disclosed.

[0045] Surprisingly, it has now been found that modulating expression I a plant of a nucleic acid encoding a SPL11 polypeptide gives plants having enhanced yield-related traits, in particular increased yield relative to control plants.

[0046] According to one embodiment, there is provided a method for enhancing yield related traits of a plant relative to control plants, comprising modulating expression of a nucleic acid encoding a SPL11 polypeptide in a plant. The enhanced yield related traits comprise one or more of increased emergence vigour (improved seedling early vigour), total seed yield (seed weight), seed fill rate (seed filling rate), number of filled seeds, number of flowers (seeds) per panicle, harvest index and thousand-kernel (1000-seed) weight, such increase occurring both under optimal and suboptimal growth conditions, preferably mild drought conditions.

[0047] According to one embodiment, there is provided novel SPL11 nucleic acids and SPL11 polypeptides as well as constructs comprising SPL11-encoding nucleic acids, useful in performing the methods of the invention

### DEFINITIONS

### Polypeptide(s)/Protein(s)

[0048] The terms “polypeptide” and “protein” are used interchangeably herein and refer to amino acids in a polymeric form of any length, linked together by peptide bonds.

### Polynucleotide(s)/Nucleic Acid(s)/Nucleic Acid Sequence(s)/Nucleotide Sequences)

[0049] The terms “polynucleotide(s)”, “nucleic acid sequence(s)”, “nucleotide sequence(s)”, “nucleic acid(s)”, “nucleic acid molecule” are used interchangeably herein and refer to nucleotides, either ribonucleotides or deoxyribonucleotides or a combination of both, in a polymeric unbranched form of any length.

### Control Plant(s)

[0050] The choice of suitable control plants is a routine part of an experimental setup and may include corresponding wild type plants or corresponding plants without the gene of interest. The control plant is typically of the same plant species or even of the same variety as the plant to be assessed. The control plant may also be a nullizygote of the plant to be assessed. Nullizygotes are individuals missing the transgene by segregation. A “control plant” as used herein refers not only to whole plants, but also to plant parts, including seeds and seed parts.

### Homologue(s)

[0051] “Homologues” of a protein encompass peptides, oligopeptides, polypeptides, proteins and enzymes having amino acid substitutions, deletions and/or insertions relative to the unmodified protein in question and having similar biological and functional activity as the unmodified protein from which they are derived.

[0052] A deletion refers to removal of one or more amino acids from a protein.

[0053] An insertion refers to one or more amino acid residues being introduced into a predetermined site in a protein. Insertions may comprise N-terminal and/or C-terminal fusions as well as intra-sequence insertions of single or multiple amino acids. Generally, insertions within the amino acid sequence will be smaller than N- or C-terminal fusions, of the order of about 1 to 10 residues. Examples of N- or C-terminal fusion proteins or peptides include the binding domain or activation domain of a transcriptional activator as used in the yeast two-hybrid system, phage coat proteins, (histidine)-6-tag, glutathione S-transferase-tag, protein A, maltose-binding protein, dihydrofolate reductase, Tag-100 epitope, c-myc epitope, FLAG®-epitope, lacZ, CMP (calmodulin-binding peptide), HA epitope, protein C epitope and VSV epitope.

[0054] A substitution refers to replacement of amino acids of the protein with other amino acids having similar properties (such as similar hydrophobicity, hydrophilicity, antigenicity, propensity to form or break α-helical structures or β-sheet structures). Amino acid substitutions are typically of single residues, but may be clustered depending upon functional constraints placed upon the polypeptide; insertions will usually be of the order of about 1 to 10 amino acid residues. The amino acid substitutions are preferably conservative amino acid substitutions. Conservative substitution tables are well known in the art (see for example Creighton (1984) Proteins. W.H. Freeman and Company (Eds) and Table 1 below).

TABLE 1
Examples of conserved amino acid substitutions

| | Conservative | | Conservative |
|---|---|---|---|
| Residue | Substitutions | Residue | Substitutions |
| Ala | Ser | Leu | Ile; Val |
| Arg | Lys | Lys | Arg; Gln |
| Asn | Gln; His | Met | Leu; Ile |
| Asp | Glu | Phe | Met; Leu; Tyr |
| Gln | Asn | Ser | Thr; Gly |
| Cys | Ser | Thy | Ser; Val |
| Glu | Asp | Trp | Tyr |
| Gly | Pro | Tyr | Trp; Phe |
| His | Asn; Gln | Val | Ile; Leu |
| Ile | Leu, Val | | |

[0055] Amino acid substitutions, deletions and/or insertions may readily be made using peptide synthetic techniques well known in the art, such as solid phase peptide synthesis and the like, or by recombinant DNA manipulation. Methods for the manipulation of DNA sequences to produce substitution, insertion or deletion variants of a protein are well known in the art. For example, techniques for making substitution mutations at predetermined sites in DNA are well known to those skilled in the art and include M13 mutagenesis, T7-Gen in vitro mutagenesis (USB, Cleveland, Ohio), QuickChange Site Directed mutagenesis (Stratagene, San Diego, Calif.), PCR-mediated site-directed mutagenesis or other site-directed mutagenesis protocols.

### Derivatives

[0056] “Derivatives” include peptides, oligopeptides, polypeptides which may, compared to the amino acid sequence of the naturally-occurring form of the protein, such as the protein of interest, comprise substitutions of amino acids with non-naturally occurring amino acid residues, or additions of non-naturally occurring amino acid residues. “Derivatives” of a protein also encompass peptides, oligopeptides, polypeptides which comprise naturally occurring altered (glycosylated, acylated, prenylated, phosphorylated, myristoylated, sulphated etc.) or non-naturally altered amino acid residues compared to the amino acid sequence of a naturally-occurring form of the polypeptide. A derivative may also comprise one or more non-amino acid substituents or additions compared to the amino acid sequence from which it is derived, for example a reporter molecule or other ligand, covalently or non-covalently bound to the amino acid sequence, such as a reporter molecule which is bound to facilitate its detection, and non-naturally occurring amino acid residues relative to the amino acid sequence of a naturally-occurring protein. Furthermore, “derivatives” also include fusions of the naturally-occurring form of the protein with tagging peptides such as FLAG, HIS6 or thioredoxin (for a review of tagging peptides, see Terpe, Appl. Microbiol. Biotechnol. 60, 523-533, 2003).

### Orthologue(s)/Paralogue(s)

[0057] Orthologues and paralogues encompass evolutionary concepts used to describe the ancestral relationships of genes. Paralogues are genes within the same species that have originated through duplication of an ancestral gene; orthologues are genes from different organisms that have originated through speciation, and are also derived from a common ancestral gene.

### Domain

[0058] The term “domain” refers to a set of amino acids conserved at specific positions along an alignment of sequences of evolutionarily related proteins. While amino acids at other positions can vary between homologues, amino acids that are highly conserved at specific positions indicate amino acids that are likely essential in the structure, stability or function of a protein. Identified by their high degree of conservation in aligned sequences of a family of protein homologues, they can be used as identifiers to determine if any polypeptide in question belongs to a previously identified polypeptide family.

### Motif/Consensus Sequence/Signature

[0059] The term “motif” or “consensus sequence” or “signature” refers to a short conserved region in the sequence of evolutionarily related proteins. Motifs are frequently highly conserved parts of domains, but may also include only part of the domain, or be located outside of conserved domain (if all of the amino acids of the motif fall outside of a defined domain).

### Hybridisation

[0060] The term “hybridisation” as defined herein is a process wherein substantially homologous complementary nucleotide sequences anneal to each other. The hybridisation process can occur entirely in solution, i.e. both complementary nucleic acids are in solution. The hybridisation process can also occur with one of the complementary nucleic acids immobilised to a matrix such as magnetic beads, Sepharose beads or any other resin. The hybridisation process can furthermore occur with one of the complementary nucleic acids immobilised to a solid support such as a nitro-cellulose or nylon membrane or immobilised by e.g. photolithography to, for example, a siliceous glass support (the latter known as nucleic acid arrays or microarrays or as nucleic acid chips). In order to allow hybridisation to occur, the nucleic acid molecules are generally thermally or chemically denatured to melt a double strand into two single strands and/or to remove hairpins or other secondary structures from single stranded nucleic acids.

[0061] The term “stringency” refers to the conditions under which a hybridisation takes place. The stringency of hybridisation is influenced by conditions such as temperature, salt concentration, ionic strength and hybridisation buffer composition. Generally, low stringency conditions are selected to be about 30° C. lower than the thermal melting point (Tₘ) for the specific sequence at a defined ionic strength and pH. Medium stringency conditions are when the temperature is 20° C. below Tₘ, and high stringency conditions are when the temperature is 10° C. below Tₘ. High stringency hybridisation conditions are typically used for isolating hybridising sequences that have high sequence similarity to the target nucleic acid sequence. However, nucleic acids may deviate in sequence and still encode a substantially identical polypeptide, due to the degeneracy of the genetic code. Therefore medium stringency hybridisation conditions may sometimes be needed to identify such nucleic acid molecules.

[0062] The Tm is the temperature under defined ionic strength and pH, at which 50% of the target sequence hybridises to a perfectly matched probe. The Tₘ is dependent upon the solution conditions and the base composition and length of the probe. For example, longer sequences hybridise specifically at higher temperatures. The maximum rate of hybridisation is obtained from about 16° C. up to 32° C. below Tₘ. The presence of monovalent cations in the hybridisation solution reduce the electrostatic repulsion between the two nucleic acid strands thereby promoting hybrid formation; this effect is visible for sodium concentrations of up to 0.4M (for higher concentrations, this effect may be ignored). Formamide reduces the melting temperature of DNA-DNA and DNA-RNA duplexes with 0.6 to 0.7° C. for each percent formamide, and addition of 50% formamide allows hybridisation to be performed at 30 to 45° C., though the rate of hybridisation will be lowered. Base pair mismatches reduce the hybridisation rate and the thermal stability of the duplexes. On average and for large probes, the Tm decreases about 1° C. per % base mismatch. The Tm may be calculated using the following equations, depending on the types of hybrids:

1) DNA-DNA hybrids (Meinkoth and Wahl, Anal. Biochem., 138: 267-284, 1984):

Tₘ=81.5° C.+16.6×log₁₀[Na⁺]^{a}+0.41×%[G/C^{b}]−500×[L^{c}]⁻¹−0.61×% formamide

2) DNA-RNA or RNA-RNA hybrids:

Tm=79.8+18.5(log₁₀[Na⁺]^{a})+0.58(% G/C^{b})+11.8(% G/C^{b})²−820/L^{c}

3) oligo-DNA or oligo-RNA^{d} hybrids:

For <20 nucleotides: Tₘ=2(lₙ)

For 20-35 nucleotides: Tₘ=22+1.46(lₙ)

^{a} or for other monovalent cation, but only accurate in the 0.01-0.4 M range.
^{b} only accurate for % GC in the 30% to 75% range.
^{c} L=length of duplex in base pairs.
^{d} oligo, oligonucleotide; lₙ=effective length of primer=2×(no. of G/C)+(no. of A/T).

[0063] Non-specific binding may be controlled using any one of a number of known techniques such as, for example, blocking the membrane with protein containing solutions, additions of heterologous RNA, DNA, and SDS to the hybridisation buffer, and treatment with Rnase. For non-homologous probes, a series of hybridizations may be performed by varying one of (i) progressively lowering the annealing temperature (for example from 68° C. to 42° C.) or (ii) progressively lowering the formamide concentration (for example from 50% to 0%). The skilled artisan is aware of various parameters which may be altered during hybridisation and which will either maintain or change the stringency conditions.

[0064] Besides the hybridisation conditions, specificity of hybridisation typically also depends on the function of post-hybridisation washes. To remove background resulting from non-specific hybridisation, samples are washed with dilute salt solutions. Critical factors of such washes include the ionic strength and temperature of the final wash solution: the lower the salt concentration and the higher the wash temperature, the higher the stringency of the wash. Wash conditions are typically performed at or below hybridisation stringency. A positive hybridisation gives a signal that is at least twice of that of the background. Generally, suitable stringent conditions for nucleic acid hybridisation assays or gene amplification detection procedures are as set forth above. More or less stringent conditions may also be selected. The skilled artisan is aware of various parameters which may be altered during washing and which will either maintain or change the stringency conditions.

[0065] For example, typical high stringency hybridisation conditions for DNA hybrids longer than 50 nucleotides encompass hybridisation at 65° C. in 1×SSC or at 42° C. in 1×SSC and 50% formamide, followed by washing at 65° C. in 0.3×SSC. Examples of medium stringency hybridisation conditions for DNA hybrids longer than 50 nucleotides encompass hybridisation at 50° C. in 4×SSC or at 40° C. in 6×SSC and 50% formamide, followed by washing at 50° C. in 2×SSC. The length of the hybrid is the anticipated length for the hybridising nucleic acid. When nucleic acids of known sequence are hybridised, the hybrid length may be determined by aligning the sequences and identifying the conserved regions described herein. 1×SSC is 0.15M NaCl and 15 mM sodium citrate; the hybridisation solution and wash solutions may additionally include 5×Denhardt's reagent, 0.5-1.0% SDS, 100 μg/ml denatured, fragmented salmon sperm DNA, 0.5% sodium pyrophosphate.

[0066] For the purposes of defining the level of stringency, reference can be made to Sambrook et al. (2001) Molecular Cloning: a laboratory manual, 3^{rd} Edition, Cold Spring Harbor Laboratory Press, CSH, New York or to Current Protocols in Molecular Biology, John Wiley & Sons, N.Y. (1989 and yearly updates).

### Splice Variant

[0067] The term “splice variant” as used herein encompasses variants of a nucleic acid sequence in which selected introns and/or exons have been excised, replaced, displaced or added, or in which introns have been shortened or lengthened. Such variants will be ones in which the biological activity of the protein is substantially retained; this may be achieved by selectively retaining functional segments of the protein. Such splice variants may be found in nature or may be manmade. Methods for predicting and isolating such splice variants are well known in the art (see for example Foissac and Schiex (2005) BMC Bioinformatics 6: 25).

### Allelic Variant

[0068] Alleles or allelic variants are alternative forms of a given gene, located at the same chromosomal position. Allelic variants encompass Single Nucleotide Polymorphisms (SNPs), as well as Small Insertion/Deletion Polymorphisms (INDELs). The size of INDELs is usually less than 100 bp. SNPs and INDELs form the largest set of sequence variants in naturally occurring polymorphic strains of most organisms.

### Gene Shuffling/Directed Evolution

[0069] Gene shuffling or directed evolution consists of iterations of DNA shuffling followed by appropriate screening and/or selection to generate variants of nucleic acids or portions thereof encoding proteins having a modified biological activity (Castle et al., (2004) Science 304(5674): 1151-4; U.S. Pat. Nos. 5,811,238 and 6,395,547).

### Regulatory Element/Control Sequence/Promoter

[0070] The terms “regulatory element”, “control sequence” and “promoter” are all used interchangeably herein and are to be taken in a broad context to refer to regulatory nucleic acid sequences capable of effecting expression of the sequences to which they are ligated. The term “promoter” typically refers to a nucleic acid control sequence located upstream from the transcriptional start of a gene and which is involved in recognising and binding of RNA polymerase and other proteins, thereby directing transcription of an operably linked nucleic acid. Encompassed by the aforementioned terms are transcriptional regulatory sequences derived from a classical eukaryotic genomic gene (including the TATA box which is required for accurate transcription initiation, with or without a CCAAT box sequence) and additional regulatory elements (i.e. upstream activating sequences, enhancers and silencers) which alter gene expression in response to developmental and/or external stimuli, or in a tissue-specific manner. Also included within the term is a transcriptional regulatory sequence of a classical prokaryotic gene, in which case it may include a −35 box sequence and/or −10 box transcriptional regulatory sequences. The term “regulatory element” also encompasses a synthetic fusion molecule or derivative that confers, activates or enhances expression of a nucleic acid molecule in a cell, tissue or organ.

[0071] A “plant promoter” comprises regulatory elements, which mediate the expression of a coding sequence segment in plant cells. Accordingly, a plant promoter need not be of plant origin, but may originate from viruses or micro-organisms, for example from viruses which attack plant cells. The “plant promoter” can also originate from a plant cell, e.g. from the plant which is transformed with the nucleic acid sequence to be expressed in the inventive process and described herein. This also applies to other “plant” regulatory signals, such as “plant” terminators. The promoters upstream of the nucleotide sequences useful in the methods of the present invention can be modified by one or more nucleotide substitution(s), insertion(s) and/or deletion(s) without interfering with the functionality or activity of either the promoters, the open reading frame (ORF) or the 3′-regulatory region such as terminators or other 3′ regulatory regions which are located away from the ORF. It is furthermore possible that the activity of the promoters is increased by modification of their sequence, or that they are replaced completely by more active promoters, even promoters from heterologous organisms. For expression in plants, the nucleic acid molecule must, as described above, be linked operably to or comprise a suitable promoter which expresses the gene at the right point in time and with the required spatial expression pattern.

[0072] For the identification of functionally equivalent promoters, the promoter strength and/or expression pattern of a candidate promoter may be analysed for example by operably linking the promoter to a reporter gene and assaying the expression level and pattern of the reporter gene in various tissues of the plant. Suitable well-known reporter genes include for example beta-glucuronidase or beta-galactosidase. The promoter activity is assayed by measuring the enzymatic activity of the beta-glucuronidase or beta-galactosidase. The promoter strength and/or expression pattern may then be compared to that of a reference promoter (such as the one used in the methods of the present invention). Alternatively, promoter strength may be assayed by quantifying mRNA levels or by comparing mRNA levels of the nucleic acid used in the methods of the present invention, with mRNA levels of housekeeping genes such as 18S rRNA, using methods known in the art, such as Northern blotting with densitometric analysis of autoradiograms, quantitative real-time PCR or RT-PCR (Heid et al., 1996 Genome Methods 6: 986-994). Generally by “weak promoter” is intended a promoter that drives expression of a coding sequence at a low level. By “low level” is intended at levels of about 1/10,000 transcripts to about 1/100,000 transcripts, to about 1/500,0000 transcripts per cell. Conversely, a “strong promoter” drives expression of a coding sequence at high level, or at about 1/10 transcripts to about 1/100 transcripts to about 1/1000 transcripts per cell. Generally, by “medium strength promoter” is intended a promoter that drives expression of a coding sequence at a lower level than a strong promoter, in particular at a level that is in all instances below that obtained when under the control of a 35S CaMV promoter.

### Operably Linked

[0073] The term “operably linked” as used herein refers to a functional linkage between the promoter sequence and the gene of interest, such that the promoter sequence is able to initiate transcription of the gene of interest.

### Constitutive Promoter

[0074] A “constitutive promoter” refers to a promoter that is transcriptionally active during most, but not necessarily all, phases of growth and development and under most environmental conditions, in at least one cell, tissue or organ. Table 2a below gives examples of constitutive promoters.

TABLE 2a
Examples of constitutive promoters

| Gene Source | Reference |
|---|---|
| Actin | McElroy et al, Plant Cell, 2: 163-171, 1990 |
| HMGP | WO 2004/070039 |
| CAMV 35S | Odell et al, Nature, 313: 810-812, 1985 |
| CaMV 19S | Nilsson et al., Physiol. Plant. 100: 456-462, 1997 |
| GOS2 | de Pater et al, Plant J Nov; 2(6): 837-44, 1992, |
| | WO 2004/065596 |
| Ubiquitin | Christensen et al, Plant Mol. Biol. 18: 675-689, |
| | 1992 |
| Rice cyclophilin | Buchholz et al, Plant Mol Biol. 25(5): 837-43, 1994 |
| Maize H3 histone | Lepetit et al, Mol. Gen. Genet. 231: 276-285, 1992 |
| Alfalfa H3 histone | Wu et al. Plant Mol. Biol. 11: 641-649, 1988 |
| Actin 2 | An et al, Plant J. 10(1); 107-121, 1996 |
| 34S FMV | Sanger et al., Plant. Mol. Biol., 14, 1990: 433-443 |
| Rubisco | U.S. Pat. No. 4,962,028 |
| small | |
| subunit | |
| OCS | Leisner (1988) Proc Natl Acad Sci USA 85(5): 2553 |
| SAD1 | Jain et al., Crop Science, 39 (6), 1999: 1696 |
| SAD2 | Jain et al., Crop Science, 39 (6), 1999: 1696 |
| nos | Shaw et al. (1984) Nucleic Acids Res. 12(20): |
| | 7831-7846 |
| V-ATPase | WO 01/14572 |
| Super promoter | WO 95/14098 |
| G-box proteins | WO 94/12015 |

### Ubiquitous Promoter

[0075] A ubiquitous promoter is active in substantially all tissues or cells of an organism.

### Developmentally-Regulated Promoter

[0076] A developmentally-regulated promoter is active during certain developmental stages or in parts of the plant that undergo developmental changes.

### Inducible Promoter

[0077] An inducible promoter has induced or increased transcription initiation in response to a chemical (for a review see Gatz 1997, Annu. Rev. Plant Physiol. Plant Mol. Biol., 48:89-108), environmental or physical stimulus, or may be “stress-inducible”, i.e. activated when a plant is exposed to various stress conditions, or a “pathogen-inducible” i.e. activated when a plant is exposed to exposure to various pathogens.

### Organ-Specific/Tissue-Specific Promoter

[0078] An organ-specific or tissue-specific promoter is one that is capable of preferentially initiating transcription in certain organs or tissues, such as the leaves, roots, seed tissue etc. For example, a “root-specific promoter” is a promoter that is transcriptionally active predominantly in plant roots, substantially to the exclusion of any other parts of a plant, whilst still allowing for any leaky expression in these other plant parts. Promoters able to initiate transcription in certain cells only are referred to herein as “cell-specific”.

[0079] Examples of root-specific promoters are listed in Table 2b below:

TABLE 2b
Examples of root-specific promoters

| Gene Source | Reference |
|---|---|
| RCc3 | Plant Mol Biol. 1995 Jan; 27(2): 237-48 |
| Arabidopsis PHT1 | Kovama et al., 2005; Mudge et al. (2002, Plant J. 31: 341) |
| Medicago phosphate transporter | Xiao et al., 2006 |
| Arabidopsis Pyk10 | Nitz et al. (2001) Plant Sci 161(2): 337-346 |
| root-expressible genes | Tingey et al., EMBO J. 6: 1, 1987. |
| tobacco auxin-inducible gene | Van der Zaal et al., Plant Mol. Biol. 16, 983, 1991. |
| β-tubulin | Oppenheimer, et al., Gene 63: 87, 1988. |
| tobacco root-specific genes | Conkling, et al., Plant Physiol. 93: 1203, 1990. |
| B. napus G1-3b gene | U.S. Pat. No. 5,401,836 |
| SbPRP1 | Suzuki et al., Plant Mol. Biol. 21: 109-119, 1993. |
| LRX1 | Baumberger et al. 2001, Genes & Dev. 15: 1128 |
| BTG-26 Brassica napus | US 20050044585 |
| LeAMT1 (tomato) | Lauter et al. (1996, PNAS 3: 8139) |
| The LeNRT1-1 (tomato) | Lauter et al. (1996, PNAS 3: 8139) |
| class I patatin gene (potato) | Liu et al., Plant Mol. Biol. 153: 386-395, 1991. |
| KDC1 (Daucus carota) | Downey et al. (2000, J. Biol. Chem. 275: 39420) |
| TobRB7 gene | W Song (1997) PhD Thesis, North Carolina State |
| | University, Raleigh, NC USA |
| OsRAB5a (rice) | Wang et al. 2002, Plant Sci. 163: 273 |
| ALF5 (Arabidopsis) | Diener et al. (2001, Plant Cell 13: 1625) |
| NRT2; 1Np (N. plumbaginifolia) | Quesada et al. (1997, Plant Mol. Biol. 34: 265) |

[0080] A seed-specific promoter is transcriptionally active predominantly in seed tissue, but not necessarily exclusively in seed tissue (in cases of leaky expression). The seed-specific promoter may be active during seed development and/or during germination. The seed specific promoter may be endosperm/aleurone/embryo specific. Examples of seed-specific promoters (endosperm/aleurone/embryo specific) are shown in Table 2d, 2e, 2f. Further examples of seed-specific promoters are given in Qing Qu and Takaiwa (Plant Biotechnol. J. 2, 113-125, 2004), which disclosure is incorporated by reference herein as if fully set forth.

TABLE 2c
Examples of seed-specific promoters

| Gene source | Reference |
|---|---|
| seed-specific genes | Simon et al., Plant Mol. Biol. 5: 191, 1985; |
| | Scofield et al., J. Biol. Chem. 262: 12202, 1987.; |
| | Baszczynski et al., Plant Mol. Biol. 14: 633, 1990. |
| Brazil Nut albumin | Pearson et al., Plant Mol. Biol. 18: 235-245, 1992. |
| legumin | Ellis et al., Plant Mol. Biol. 10: 203-214, 1988. |
| glutelin (rice) | Takaiwa et al., Mol. Gen. Genet. 208: 15-22. 1986; |
| | Takaiwa et al., FEBS Letts. 221: 43-47, 1987. |
| zein | Matzke et al Plant Mol Biol, 14(3): 323-32 1990 |
| napA | Stalberg et al, Planta 199: 515-519, 1996. |
| wheat LMW and HMW glutenin-1 | Mol Gen Genet 216: 81-90, 1989; NAR 17: 461-2, 1989 |
| wheat SPA | Albani et al, Plant Cell, 9: 171-184, 1997 |
| wheat α, β, γ-gliadins | EMBO J. 3: 1409-15, 1984 |
| barley Itr1 promoter | Diaz et al. (1995) Mol Gen Genet 248(5): 592-8 |
| barley B1, C, D, hordein | Theor Appl Gen 98: 1253-62, 1999; Plant J 4: 343-55, 1993; |
| | Mol Gen Genet 250: 750-60, 1996 |
| barley DOF | Mena et al, The Plant Journal, 116(1): 53-62, 1998 |
| blz2 | EP99106056.7 |
| synthetic promoter | Vicente-Carbajosa et al., Plant J. 13: 629-640, 1998. |
| rice prolamin NRP33 | Wu et al, Plant Cell Physiology 39(8) 885-889, 1998 |
| rice a-globulin Glb-1 | Wu et al, Plant Cell Physiology 39(8) 885-889, 1998 |
| rice OSH1 | Sato et al, Proc. Natl. Acad. Sci. USA, 93: 8117-8122, 1996 |
| rice α-globulin REB/OHP-1 | Nakase et al. Plant Mol. Biol. 33: 513-522, 1997 |
| rice ADP-glucose pyrophosphorylase | Trans Res 6: 157-68, 1997 |
| maize ESR gene family | Plant J 12: 235-46, 1997 |
| sorghum α-kafirin | DeRose et al., Plant Mol. Biol 32: 1029-35, 1996 |
| KNOX | Postma-Haarsma et al, Plant Mol. Biol. 39: 257-71, 1999 |
| rice oleosin | Wu et al, J. Biochem. 123: 386, 1998 |
| sunflower oleosin | Cummins et al., Plant Mol. Biol. 19: 873-876, 1992 |
| PRO0117, putative rice 40S | WO 2004/070039 |
| ribosomal protein | |
| PRO0136, rice alanine | unpublished |
| aminotransferase | |
| PRO0147, trypsin inhibitor ITR1 | unpublished |
| (barley) | |
| PRO0151, rice WSI18 | WO 2004/070039 |
| PRO0175, rice RAB21 | WO 2004/070039 |
| PRO005 | WO 2004/070039 |
| PRO0095 | WO 2004/070039 |
| α-amylase (Amy32b) | Lanahan et al, Plant Cell 4: 203-211, 1992; Skriver et al, |
| | Proc Natl Acad Sci USA 88: 7266-7270, 1991 |
| cathepsin β-like gene | Cejudo et al, Plant Mol Biol 20: 849-856, 1992 |
| Barley Ltp2 | Kalla et al., Plant J. 6: 849-60, 1994 |
| Chi26 | Leah et al., Plant J. 4: 579-89, 1994 |
| Maize B-Peru | Selinger et al., Genetics 149; 1125-38, 1998 |

TABLE 2d
examples of endosperm-specific promoters

| Gene source | Reference |
|---|---|
| glutelin (rice) | Takaiwa et al. (1986) Mol Gen Genet 208: 15-22; |
| | Takaiwa et al. (1987) FEBS Letts. 221: 43-47 |
| zein | Matzke et al., (1990) Plant Mol Biol 14(3): 323-32 |
| wheat LMW and | Colot et al. (1989) Mol Gen Genet 216: 81-90, |
| HMW glutenin-1 | Anderson et al. (1989) NAR 17: 461-2 |
| wheat SPA | Albani et al. (1997) Plant Cell 9: 171-184 |
| wheat gliadins | Rafalski et al. (1984) EMBO 3: 1409-15 |
| barley Itr1 promoter | Diaz et al. (1995) Mol Gen Genet 248(5): 592-8 |
| barley B1, C, D, | Cho et al. (1999) Theor Appl Genet 98: 1253-62; |
| hordein | Muller et al. (1993) Plant J 4: 343-55; |
| | Sorenson et al. (1996) Mol Gen Genet 250: 750-60 |
| barley DOF | Mena et al, (1998) Plant J 116(1): 53-62 |
| blz2 | Onate et al. (1999) J Biol Chem 274(14): 9175-82 |
| synthetic promoter | Vicente-Carbajosa et al. (1998) Plant J 13: 629-640 |
| rice prolamin | Wu et al, (1998) Plant Cell Physiol 39(8) 885-889 |
| NRP33 | |
| rice globulin Glb-1 | Wu et al. (1998) Plant Cell Physiol 39(8) 885-889 |
| rice globulin | Nakase et al. (1997) Plant Molec Biol 33: 513-522 |
| REB/OHP-1 | |
| rice ADP-glucose | Russell et al. (1997) Trans Res 6: 157-68 |
| pyrophosphorylase | |
| maize ESR gene | Opsahl-Ferstad et al. (1997) Plant J 12: 235-46 |
| family | |
| sorghum kafirin | DeRose et al. (1996) Plant Mol Biol 32: 1029-35 |

TABLE 2e
Examples of embryo specific promoters:

| Gene source | Reference |
|---|---|
| rice OSH1 | Sato et al, Proc. Natl. Acad. Sci. USA, |
| | 93: 8117-8122, 1996 |
| KNOX | Postma-Haarsma et al, Plant Mol. Biol. |
| | 39: 257-71, 1999 |
| PRO0151 | WO 2004/070039 |
| PRO0175 | WO 2004/070039 |
| PRO005 | WO 2004/070039 |
| PRO0095 | WO 2004/070039 |

TABLE 2f
Examples of aleurone-specific promoters:

| Gene source | Reference |
|---|---|
| α-amylase (Amy32b) | Lanahan et al, Plant Cell 4: 203-211, 1992; |
| | Skriver et al, Proc Natl Acad Sci USA 88: |
| | 7266-7270, 1991 |
| cathepsin β-like gene | Cejudo et al, Plant Mol Biol 20: 849-856, 1992 |
| Barley Ltp2 | Kalla et al., Plant J. 6: 849-60, 1994 |
| Chi26 | Leah et al., Plant J. 4: 579-89, 1994 |
| Maize B-Peru | Selinger et al., Genetics 149; 1125-38, 1998 |

[0081] A green tissue-specific promoter as defined herein is a promoter that is transcriptionally active predominantly in green tissue, substantially to the exclusion of any other parts of a plant, whilst still allowing for any leaky expression in these other plant parts.

[0082] Examples of green tissue-specific promoters which may be used to perform the methods of the invention are shown in Table 2g.

TABLE 2g
Examples of green tissue-specific promoters

| Gene | Expression | Reference |
|---|---|---|
| Maize Orthophosphate dikinase | Leaf specific | Fukavama et al., 2001 |
| Maize Phosphoenolpyruvate | Leaf specific | Kausch et al., 2001 |
| carboxylase | | |
| Rice Phosphoenolpyruvate | Leaf specific | Liu et al., 2003 |
| carboxylase | | |
| Rice small subunit Rubisco | Leaf specific | Nomura et al., 2000 |
| rice beta expansin EXBP9 | Shoot specific | WO 2004/070039 |
| Pigeonpea small subunit Rubisco | Leaf specific | Panguluri et al., 2005 |
| Pea RBCS3A | Leaf specific | |

[0083] Another example of a tissue-specific promoter is a meristem-specific promoter, which is transcriptionally active predominantly in meristematic tissue, substantially to the exclusion of any other parts of a plant, whilst still allowing for any leaky expression in these other plant parts. Examples of green meristem-specific promoters which may be used to perform the methods of the invention are shown in Table 2h below.

TABLE 2h
Examples of meristem-specific promoters

| Gene source | Expression pattern | Reference |
|---|---|---|
| rice OSH1 | Shoot apical meristem, from | Sato et al. (1996) |
| | embryo globular stage to | Proc. Natl. Acad. Sci. |
| | seedling stage | USA, 93: 8117-8122 |
| Rice | Meristem specific | BAD87835.1 |
| metallothionein | | |
| WAK1 & WAK 2 | Shoot and root apical | Wagner & Kohorn |
| | meristems, and in expanding | (2001) Plant Cell |
| | leaves and sepals | 13(2): 303-318 |

### Terminator

[0084] The term “terminator” encompasses a control sequence which is a DNA sequence at the end of a transcriptional unit which signals 3′ processing and polyadenylation of a primary transcript and termination of transcription. The terminator can be derived from the natural gene, from a variety of other plant genes, or from T-DNA. The terminator to be added may be derived from, for example, the nopaline synthase or octopine synthase genes, or alternatively from another plant gene, or less preferably from any other eukaryotic gene.

### Modulation

[0085] The term “modulation” means in relation to expression or gene expression, a process in which the expression level is changed by said gene expression in comparison to the control plant, the expression level may be increased or decreased. The original, unmodulated expression may be of any kind of expression of a structural RNA (rRNA, tRNA) or mRNA with subsequent translation. The term “modulating the activity” shall mean any change of the expression of the inventive nucleic acid sequences or encoded proteins, which leads to increased yield and/or increased growth of the plants.

### Expression

[0086] The term “expression” or “gene expression” means the transcription of a specific gene or specific genes or specific genetic construct. The term “expression” or “gene expression” in particular means the transcription of a gene or genes or genetic construct into structural RNA (rRNA, tRNA) or mRNA with or without subsequent translation of the latter into a protein. The process includes transcription of DNA and processing of the resulting mRNA product.

### Increased Expression/Overexpression

[0087] The term “increased expression” or “overexpression” as used herein means any form of expression that is additional to the original wild-type expression level.

[0088] Methods for increasing expression of genes or gene products are well documented in the art and include, for example, overexpression driven by appropriate promoters, the use of transcription enhancers or translation enhancers. Isolated nucleic acids which serve as promoter or enhancer elements may be introduced in an appropriate position (typically upstream) of a non-heterologous form of a polynucleotide so as to upregulate expression of a nucleic acid encoding the polypeptide of interest. For example, endogenous promoters may be altered in vivo by mutation, deletion, and/or substitution (see, Kmiec, U.S. Pat. No. 5,565,350; Zarling et al., WO9322443), or isolated promoters may be introduced into a plant cell in the proper orientation and distance from a gene of the present invention so as to control the expression of the gene.

[0089] If polypeptide expression is desired, it is generally desirable to include a polyadenylation region at the 3′-end of a polynucleotide coding region. The polyadenylation region can be derived from the natural gene, from a variety of other plant genes, or from T-DNA. The 3′ end sequence to be added may be derived from, for example, the nopaline synthase or octopine synthase genes, or alternatively from another plant gene, or less preferably from any other eukaryotic gene.

[0090] An intron sequence may also be added to the 5′ untranslated region (UTR) or the coding sequence of the partial coding sequence to increase the amount of the mature message that accumulates in the cytosol. Inclusion of a spliceable intron in the transcription unit in both plant and animal expression constructs has been shown to increase gene expression at both the mRNA and protein levels up to 1000-fold (Buchman and Berg (1988) Mol. Cell. biol. 8: 4395-4405; Callis et al. (1987) Genes Dev 1:1183-1200). Such intron enhancement of gene expression is typically greatest when placed near the 5′ end of the transcription unit. Use of the maize introns Adh1-S intron 1, 2, and 6, the Bronze-1 intron are known in the art. For general information see: The Maize Handbook, Chapter 116, Freeling and Walbot, Eds., Springer, N.Y. (1994).

### Endogenous Gene

[0091] Reference herein to an “endogenous” gene not only refers to the gene in question as found in a plant in its natural form (i.e., without there being any human intervention), but also refers to that same gene (or a substantially homologous nucleic acid/gene) in an isolated form subsequently (re)introduced into a plant (a transgene). For example, a transgenic plant containing such a transgene may encounter a substantial reduction of the transgene expression and/or substantial reduction of expression of the endogenous gene. The isolated gene may be isolated from an organism or may be manmade, for example by chemical synthesis.

### Decreased Expression

[0092] Reference herein to “decreased expression” or “reduction or substantial elimination” of expression is taken to mean a decrease in endogenous gene expression and/or polypeptide levels and/or polypeptide activity relative to control plants. The reduction or substantial elimination is in increasing order of preference at least 10%, 20%, 30%, 40% or 50%, 60%, 70%, 80%, 85%, 90%, or 95%, 96%, 97%, 98%, 99% or more reduced compared to that of control plants.

[0093] For the reduction or substantial elimination of expression an endogenous gene in a plant, a sufficient length of substantially contiguous nucleotides of a nucleic acid sequence is required, In order to perform gene silencing, this may be as little as 20, 19, 18, 17, 16, 15, 14, 13, 12, 11, 10 or fewer nucleotides, alternatively this may be as much as the entire gene (including the 5′ and/or 3′ UTR, either in part or in whole). The stretch of substantially contiguous nucleotides may be derived from the nucleic acid encoding the protein of interest (target gene), or from any nucleic acid capable of encoding an orthologue, paralogue or homologue of the protein of interest. Preferably, the stretch of substantially contiguous nucleotides is capable of forming hydrogen bonds with the target gene (either sense or antisense strand), more preferably, the stretch of substantially contiguous nucleotides has, in increasing order of preference, 50%, 60%, 70%, 80%, 85%, 90%, 95%, 96%, 97%, 98%, 99%, 100% sequence identity to the target gene (either sense or antisense strand). A nucleic acid sequence encoding a (functional) polypeptide is not a requirement for the various methods discussed herein for the reduction or substantial elimination of expression of an endogenous gene.

[0094] This reduction or substantial elimination of expression may be achieved using routine tools and techniques. A preferred method for the reduction or substantial elimination of endogenous gene expression is by introducing and expressing in a plant a genetic construct into which the nucleic acid (in this case a stretch of substantially contiguous nucleotides derived from the gene of interest, or from any nucleic acid capable of encoding an orthologue, paralogue or homologue of any one of the protein of interest) is cloned as an inverted repeat (in part or completely), separated by a spacer (non-coding DNA).

[0095] In such a preferred method, expression of the endogenous gene is reduced or substantially eliminated through RNA-mediated silencing using an inverted repeat of a nucleic acid or a part thereof (in this case a stretch of substantially contiguous nucleotides derived from the gene of interest, or from any nucleic acid capable of encoding an orthologue, paralogue or homologue of the protein of interest), preferably capable of forming a hairpin structure. The inverted repeat is cloned in an expression vector comprising control sequences. A non-coding DNA nucleic acid sequence (a spacer, for example a matrix attachment region fragment (MAR), an intron, a polylinker, etc.) is located between the two inverted nucleic acids forming the inverted repeat After transcription of the inverted repeat, a chimeric RNA with a self-complementary structure is formed (partial or complete). This double-stranded RNA structure is referred to as the hairpin RNA (hpRNA). The hpRNA is processed by the plant into siRNAs that are incorporated into an RNA-induced silencing complex (RISC). The RISC further cleaves the mRNA transcripts, thereby substantially reducing the number of mRNA transcripts to be translated into polypeptides. For further general details see for example, Grierson et al. (1998) WO 98/53083; Waterhouse et al. (1999) WO 99/53050).

[0096] Performance of the methods of the invention does not rely on introducing and expressing in a plant a genetic construct into which the nucleic acid is cloned as an inverted repeat, but any one or more of several well-known “gene silencing” methods may be used to achieve the same effects.

[0097] One such method for the reduction of endogenous gene expression is RNA-mediated silencing of gene expression (downregulation). Silencing in this case is triggered in a plant by a double stranded RNA sequence (dsRNA) that is substantially similar to the target endogenous gene. This dsRNA is further processed by the plant into about 20 to about 26 nucleotides called short interfering RNAs (siRNAs). The siRNAs are incorporated into an RNA-induced silencing complex (RISC) that cleaves the mRNA transcript of the endogenous target gene, thereby substantially reducing the number of mRNA transcripts to be translated into a polypeptide. Preferably, the double stranded RNA sequence corresponds to a target gene.

[0098] Another example of an RNA silencing method involves the introduction of nucleic acid sequences or parts thereof (in this case a stretch of substantially contiguous nucleotides derived from the gene of interest, or from any nucleic acid capable of encoding an orthologue, paralogue or homologue of the protein of interest) in a sense orientation into a plant. “Sense orientation” refers to a DNA sequence that is homologous to an mRNA transcript thereof. Introduced into a plant would therefore be at least one copy of the nucleic acid sequence. The additional nucleic acid sequence will reduce expression of the endogenous gene, giving rise to a phenomenon known as co-suppression. The reduction of gene expression will be more pronounced if several additional copies of a nucleic acid sequence are introduced into the plant, as there is a positive correlation between high transcript levels and the triggering of co-suppression.

[0099] Another example of an RNA silencing method involves the use of antisense nucleic acid sequences. An “antisense” nucleic acid sequence comprises a nucleotide sequence that is complementary to a “sense” nucleic acid sequence encoding a protein, i.e. complementary to the coding strand of a double-stranded cDNA molecule or complementary to an mRNA transcript sequence. The antisense nucleic acid sequence is preferably complementary to the endogenous gene to be silenced. The complementarity may be located in the “coding region” and/or in the “non-coding region” of a gene. The term “coding region” refers to a region of the nucleotide sequence comprising codons that are translated into amino acid residues. The term “non-coding region” refers to 5′ and 3′ sequences that flank the coding region that are transcribed but not translated into amino acids (also referred to as 5′ and 3′ untranslated regions).

[0100] Antisense nucleic acid sequences can be designed according to the rules of Watson and Crick base pairing. The antisense nucleic acid sequence may be complementary to the entire nucleic acid sequence (in this case a stretch of substantially contiguous nucleotides derived from the gene of interest, or from any nucleic acid capable of encoding an orthologue, paralogue or homologue of the protein of interest), but may also be an oligonucleotide that is antisense to only a part of the nucleic acid sequence (including the mRNA 5′ and 3′ UTR). For example, the antisense oligonucleotide sequence may be complementary to the region surrounding the translation start site of an mRNA transcript encoding a polypeptide. The length of a suitable antisense oligonucleotide sequence is known in the art and may start from about 50, 45, 40, 35, 30, 25, 20, 15 or 10 nucleotides in length or less. An antisense nucleic acid sequence according to the invention may be constructed using chemical synthesis and enzymatic ligation reactions using methods known in the art. For example, an antisense nucleic acid sequence (e.g., an antisense oligonucleotide sequence) may be chemically synthesized using naturally occurring nucleotides or variously modified nucleotides designed to increase the biological stability of the molecules or to increase the physical stability of the duplex formed between the antisense and sense nucleic acid sequences, e.g., phosphorothioate derivatives and acridine substituted nucleotides may be used. Examples of modified nucleotides that may be used to generate the antisense nucleic acid sequences are well known in the art. Known nucleotide modifications include methylation, cyclization and ‘caps’ and substitution of one or more of the naturally occurring nucleotides with an analogue such as inosine. Other modifications of nucleotides are well known in the art.

[0101] The antisense nucleic acid sequence can be produced biologically using an expression vector into which a nucleic acid sequence has been subcloned in an antisense orientation (i.e., RNA transcribed from the inserted nucleic acid will be of an antisense orientation to a target nucleic acid of interest). Preferably, production of antisense nucleic acid sequences in plants occurs by means of a stably integrated nucleic acid construct comprising a promoter, an operably linked antisense oligonucleotide, and a terminator.

[0102] The nucleic acid molecules used for silencing in the methods of the invention (whether introduced into a plant or generated in situ) hybridize with or bind to mRNA transcripts and/or genomic DNA encoding a polypeptide to thereby inhibit expression of the protein, e.g., by inhibiting transcription and/or translation. The hybridization can be by conventional nucleotide complementarity to form a stable duplex, or, for example, in the case of an antisense nucleic acid sequence which binds to DNA duplexes, through specific interactions in the major groove of the double helix. Antisense nucleic acid sequences may be introduced into a plant by transformation or direct injection at a specific tissue site. Alternatively, antisense nucleic acid sequences can be modified to target selected cells and then administered systemically. For example, for systemic administration, antisense nucleic acid sequences can be modified such that they specifically bind to receptors or antigens expressed on a selected cell surface, e.g., by linking the antisense nucleic acid sequence to peptides or antibodies which bind to cell surface receptors or antigens. The antisense nucleic acid sequences can also be delivered to cells using the vectors described herein.

[0103] According to a further aspect, the antisense nucleic acid sequence is an a-anomeric nucleic acid sequence. An a-anomeric nucleic acid sequence forms specific double-stranded hybrids with complementary RNA in which, contrary to the usual b-units, the strands run parallel to each other (Gaultier et al. (1987) Nucl Ac Res 15: 6625-6641). The antisense nucleic acid sequence may also comprise a 2′-o-methylribonucleotide (Inoue et al. (1987) Nucl Ac Res 15, 6131-6148) or a chimeric RNA-DNA analogue (Inoue et al. (1987) FEBS Lett. 215, 327-330).

[0104] The reduction or substantial elimination of endogenous gene expression may also be performed using ribozymes. Ribozymes are catalytic RNA molecules with ribonuclease activity that are capable of cleaving a single-stranded nucleic acid sequence, such as an mRNA, to which they have a complementary region. Thus, ribozymes (e.g., hammerhead ribozymes (described in Haselhoff and Gerlach (1988) Nature 334, 585-591) can be used to catalytically cleave mRNA transcripts encoding a polypeptide, thereby substantially reducing the number of mRNA transcripts to be translated into a polypeptide. A ribozyme having specificity for a nucleic acid sequence can be designed (see for example: Cech et al. U.S. Pat. No. 4,987,071; and Cech et al. U.S. Pat. No. 5,116,742). Alternatively, mRNA transcripts corresponding to a nucleic acid sequence can be used to select a catalytic RNA having a specific ribonuclease activity from a pool of RNA molecules (Bartel and Szostak (1993) Science 261, 1411-1418). The use of ribozymes for gene silencing in plants is known in the art (e.g., Atkins et al, (1994) WO 94/00012; Lenne et al. (1995) WO 95/03404; Lutziger et al. (2000) WO 00/00619; Prinsen et al. (1997) WO 97/13865 and Scott et al. (1997) WO 97/38116).

[0105] Gene silencing may also be achieved by insertion mutagenesis (for example, T-DNA insertion or transposon insertion) or by strategies as described by, among others, Angell and Baulcombe ((1999) Plant J 20(3): 357-62), (Amplicon VIGS WO 98/36083), or Baulcombe (WO 99/15682).

[0106] Gene silencing may also occur if there is a mutation on an endogenous gene and/or a mutation on an isolated gene/nucleic acid subsequently introduced into a plant. The reduction or substantial elimination may be caused by a non-functional polypeptide. For example, the polypeptide may bind to various interacting proteins; one or more mutation(s) and/or truncation(s) may therefore provide for a polypeptide that is still able to bind interacting proteins (such as receptor proteins) but that cannot exhibit its normal function (such as signalling ligand).

[0107] A further approach to gene silencing is by targeting nucleic acid sequences complementary to the regulatory region of the gene (e.g., the promoter and/or enhancers) to form triple helical structures that prevent transcription of the gene in target cells. See Helene, C., Anticancer Drug Res. 6, 569-84, 1991; Helene et al., Ann. N.Y. Acad. Sci. 660, 27-36 1992; and Maher, L. J. Bioassays 14, 807-15, 1992.

[0108] Other methods, such as the use of antibodies directed to an endogenous polypeptide for inhibiting its function in planta, or interference in the signalling pathway in which a polypeptide is involved, will be well known to the skilled man. In particular, it can be envisaged that manmade molecules may be useful for inhibiting the biological function of a target polypeptide, or for interfering with the signalling pathway in which the target polypeptide is involved.

[0109] Alternatively, a screening program may be set up to identify in a plant population natural variants of a gene, which variants encode polypeptides with reduced activity. Such natural variants may also be used for example, to perform homologous recombination.

[0110] Artificial and/or natural microRNAs (miRNAs) may be used to knock out gene expression and/or mRNA translation. Endogenous miRNAs are single stranded small RNAs of typically 19-24 nucleotides long. They function primarily to regulate gene expression and/or mRNA translation. Most plant microRNAs (miRNAs) have perfect or near-perfect complementarity with their target sequences. However, there are natural targets with up to five mismatches. They are processed from longer non-coding RNAs with characteristic fold-back structures by double-strand specific RNases of the Dicer family. Upon processing, they are incorporated in the RNA-induced silencing complex (RISC) by binding to its main component, an Argonaute protein. mRNAs serve as the specificity components of RISC, since they base-pair to target nucleic acids, mostly mRNAs, in the cytoplasm. Subsequent regulatory events include target mRNA cleavage and destruction and/or translational inhibition. Effects of miRNA overexpression are thus often reflected in decreased mRNA levels of target genes.

[0111] Artificial microRNAs (amiRNAs), which are typically 21 nucleotides in length, can be genetically engineered specifically to negatively regulate gene expression of single or multiple genes of interest. Determinants of plant microRNA target selection are well known in the art. Empirical parameters for target recognition have been defined and can be used to aid in the design of specific amiRNAs, (Schwab et al., Dev. Cell 8, 517-527, 2005). Convenient tools for design and generation of amiRNAs and their precursors are also available to the public (Schwab et al., Plant Cell 18, 1121-1133, 2006).

[0112] For optimal performance, the gene silencing techniques used for reducing expression in a plant of an endogenous gene requires the use of nucleic acid sequences from monocotyledonous plants for transformation of monocotyledonous plants, and from dicotyledonous plants for transformation of dicotyledonous plants. Preferably, a nucleic acid sequence from any given plant species is introduced into that same species. For example, a nucleic acid sequence from rice is transformed into a rice plant. However, it is not an absolute requirement that the nucleic acid sequence to be introduced originates from the same plant species as the plant in which it will be introduced. It is sufficient that there is substantial homology between the endogenous target gene and the nucleic acid to be introduced.

[0113] Described above are examples of various methods for the reduction or substantial elimination of expression in a plant of an endogenous gene. A person skilled in the art would readily be able to adapt the aforementioned methods for silencing so as to achieve reduction of expression of an endogenous gene in a whole plant or in parts thereof through the use of an appropriate promoter, for example.

### Selectable Marker (Gene)/Reporter Gene

[0114] “Selectable marker”, “selectable marker gene” or “reporter gene” includes any gene that confers a phenotype on a cell in which it is expressed to facilitate the identification and/or selection of cells that are transfected or transformed with a nucleic acid construct of the invention. These marker genes enable the identification of a successful transfer of the nucleic acid molecules via a series of different principles. Suitable markers may be selected from markers that confer antibiotic or herbicide resistance, that introduce a new metabolic trait or that allow visual selection. Examples of selectable marker genes include genes conferring resistance to antibiotics (such as nptII that phosphorylates neomycin and kanamycin, or hpt, phosphorylating hygromycin, or genes conferring resistance to, for example, bleomycin, streptomycin, tetracyclin, chloramphenicol, ampicillin, gentamycin, geneticin (G418), spectinomycin or blasticidin), to herbicides (for example bar which provides resistance to Basta®; aroA or gox providing resistance against glyphosate, or the genes conferring resistance to, for example, imidazolinone, phosphinothricin or sulfonylurea), or genes that provide a metabolic trait (such as manA that allows plants to use mannose as sole carbon source or xylose isomerase for the utilisation of xylose, or antinutritive markers such as the resistance to 2-deoxyglucose). Expression of visual marker genes results in the formation of colour (for example β-glucuronidase, GUS or β-galactosidase with its coloured substrates, for example X-Gal), luminescence (such as the luciferin/luciferase system) or fluorescence (Green Fluorescent Protein, GFP, and derivatives thereof). This list represents only a small number of possible markers. The skilled worker is familiar with such markers. Different markers are preferred, depending on the organism and the selection method.

[0115] It is known that upon stable or transient integration of nucleic acids into plant cells, only a minority of the cells takes up the foreign DNA and, if desired, integrates it into its genome, depending on the expression vector used and the transfection technique used. To identify and select these integrants, a gene coding for a selectable marker (such as the ones described above) is usually introduced into the host cells together with the gene of interest. These markers can for example be used in mutants in which these genes are not functional by, for example, deletion by conventional methods. Furthermore, nucleic acid molecules encoding a selectable marker can be introduced into a host cell on the same vector that comprises the sequence encoding the polypeptides of the invention or used in the methods of the invention, or else in a separate vector. Cells which have been stably transfected with the introduced nucleic acid can be identified for example by selection (for example, cells which have integrated the selectable marker survive whereas the other cells die).

[0116] Since the marker genes, particularly genes for resistance to antibiotics and herbicides, are no longer required or are undesired in the transgenic host cell once the nucleic acids have been introduced successfully, the process according to the invention for introducing the nucleic acids advantageously employs techniques which enable the removal or excision of these marker genes. One such a method is what is known as co-transformation. The co-transformation method employs two vectors simultaneously for the transformation, one vector bearing the nucleic acid according to the invention and a second bearing the marker gene(s). A large proportion of transformants receives or, in the case of plants, comprises (up to 40% or more of the transformants), both vectors. In case of transformation with Agrobacteria, the transformants usually receive only a part of the vector, i.e. the sequence flanked by the T-DNA, which usually represents the expression cassette. The marker genes can subsequently be removed from the transformed plant by performing crosses. In another method, marker genes integrated into a transposon are used for the transformation together with desired nucleic acid (known as the Ac/Ds technology). The transformants can be crossed with a transposase source or the transformants are transformed with a nucleic acid construct conferring expression of a transposase, transiently or stable. In some cases (approx. 10%), the transposon jumps out of the genome of the host cell once transformation has taken place successfully and is lost. In a further number of cases, the transposon jumps to a different location. In these cases the marker gene must be eliminated by performing crosses. In microbiology, techniques were developed which make possible, or facilitate, the detection of such events. A further advantageous method relies on what is known as recombination systems; whose advantage is that elimination by crossing can be dispensed with. The best-known system of this type is what is known as the Cre/lox system. Cre1 is a recombinase that removes the sequences located between the loxP sequences. If the marker gene is integrated between the loxP sequences, it is removed once transformation has taken place successfully, by expression of the recombinase. Further recombination systems are the HIN/HIX, FLP/FRT and REP/STB system (Tribble et al., J. Biol. Chem., 275, 2000: 22255-22287; Velmurugan et al., J. Cell Biol., 149, 2000: 553-566). A site-specific integration into the plant genome of the nucleic acid sequences according to the invention is possible. Naturally, these methods can also be applied to microorganisms such as yeast, fungi or bacteria.

### Transgenic/Transgene/Recombinant

[0117] For the purposes of the invention, “transgenic”, “transgene” or “recombinant” means with regard to, for example, a nucleic acid sequence, an expression cassette, gene construct or a vector comprising the nucleic acid sequence or an organism transformed with the nucleic acid sequences, expression cassettes or vectors according to the invention, all those constructions brought about by recombinant methods in which either
[0118] (a) the nucleic acid sequences encoding proteins useful in the methods of the invention, or
[0119] (b) genetic control sequence(s) which is operably linked with the nucleic acid sequence according to the invention, for example a promoter, or
[0120] (c) a) and b)
   are not located in their natural genetic environment or have been modified by recombinant methods, it being possible for the modification to take the form of, for example, a substitution, addition, deletion, inversion or insertion of one or more nucleotide residues. The natural genetic environment is understood as meaning the natural genomic or chromosomal locus in the original plant or the presence in a genomic library. In the case of a genomic library, the natural genetic environment of the nucleic acid sequence is preferably retained, at least in part. The environment flanks the nucleic acid sequence at least on one side and has a sequence length of at least 50 bp, preferably at least 500 bp, especially preferably at least 1000 bp, most preferably at least 5000 bp. A naturally occurring expression cassette for example the naturally occurring combination of the natural promoter of the nucleic acid sequences with the corresponding nucleic acid sequence encoding a polypeptide useful in the methods of the present invention, as defined above becomes a transgenic expression cassette when this expression cassette is modified by non-natural, synthetic (“artificial”) methods such as, for example, mutagenic treatment. Suitable methods are described, for example, in U.S. Pat. No. 5,565,350 or WO 00/15815.

[0121] A transgenic plant for the purposes of the invention is thus understood as meaning, as above, that the nucleic acids used in the method of the invention are not at their natural locus in the genome of said plant, it being possible for the nucleic acids to be expressed homologously or heterologously. However, as mentioned, transgenic also means that, while the nucleic acids according to the invention or used in the inventive method are at their natural position in the genome of a plant, the sequence has been modified with regard to the natural sequence, and/or that the regulatory sequences of the natural sequences have been modified. Transgenic is preferably understood as meaning the expression of the nucleic acids according to the invention at an unnatural locus in the genome, i.e. homologous or, preferably, heterologous expression of the nucleic acids takes place. Preferred transgenic plants are mentioned herein.

### Transformation

[0122] The term ‘introduction’ or “transformation” as referred to herein encompasses the transfer of an exogenous polynucleotide into a host cell, irrespective of the method used for transfer. Plant tissue capable of subsequent clonal propagation, whether by organogenesis or embryogenesis, may be transformed with a genetic construct of the present invention and a whole plant regenerated there from. The particular tissue chosen will vary depending on the clonal propagation systems available for, and best suited to, the particular species being transformed. Exemplary tissue targets include leaf disks, pollen, embryos, cotyledons, hypocotyls, megagametophytes, callus tissue, existing meristematic tissue (e.g., apical meristem, axillary buds, and root meristems), and induced meristem tissue (e.g., cotyledon meristem and hypocotyl meristem). The polynucleotide may be transiently or stably introduced into a host cell and may be maintained non-integrated, for example, as a plasmid. Alternatively, it may be integrated into the host genome. The resulting transformed plant cell may then be used to regenerate a transformed plant in a manner known to persons skilled in the art.

[0123] The transfer of foreign genes into the genome of a plant is called transformation. Transformation of plant species is now a fairly routine technique. Advantageously, any of several transformation methods may be used to introduce the gene of interest into a suitable ancestor cell. The methods described for the transformation and regeneration of plants from plant tissues or plant cells may be utilized for transient or for stable transformation. Transformation methods include the use of liposomes, electroporation, chemicals that increase free DNA uptake, injection of the DNA directly into the plant, particle gun bombardment, transformation using viruses or pollen and microprojection. Methods may be selected from the calcium/polyethylene glycol method for protoplasts (Krens, F. A. et al., (1982) Nature 296, 72-74; Negrutiu I et al. (1987) Plant Mol Bid 8: 363-373); electroporation of protoplasts (Shillito R. D. et al. (1985) Bio/Technol 3, 1099-1102); microinjection into plant material (Crossway A et al., (1986) Mol. Gen. Genet. 202: 179-185); DNA or RNA-coated particle bombardment (Klein T M et al., (1987) Nature 327: 70) infection with (non-integrative) viruses and the like. Transgenic plants, including transgenic crop plants, are preferably produced via Agrobacterium-mediated transformation. An advantageous transformation method is the transformation in planta. To this end, it is possible, for example, to allow the agrobacteria to act on plant seeds or to inoculate the plant meristem with agrobacteria. It has proved particularly expedient in accordance with the invention to allow a suspension of transformed agrobacteria to act on the intact plant or at least on the flower primordia. The plant is subsequently grown on until the seeds of the treated plant are obtained (Clough and Bent, Plant J. (1998) 16, 735-743). Methods for Agrobacterium-mediated transformation of rice include well known methods for rice transformation, such as those described in any of the following: European patent application EP 1198985 A1, Aldemita and Hodges (Planta 199: 612-617, 1996); Chan at al. (Plant Mol Biol 22 (3): 491-506, 1993), Hiei at al. (Plant J 6 (2): 271-282, 1994), which disclosures are incorporated by reference herein as if fully set forth. In the case of corn transformation, the preferred method is as described in either Ishida et al. (Nat. Biotechnol 14(6): 745-50, 1996) or Frame et al. (Plant Physiol 129(1): 13-22, 2002), which disclosures are incorporated by reference herein as if fully set forth. Said methods are further described by way of example in B. Jenes et al., Techniques for Gene Transfer, in; Transgenic Plants, Vol. 1, Engineering and Utilization, eds. S. D. Kung and R. Wu, Academic Press (1993) 128-143 and in Potrykus Annu. Rev. Plant Physiol. Plant Molec. Biol. 42 (1991) 205-225). The nucleic acids or the construct to be expressed is preferably cloned into a vector, which is suitable for transforming Agrobacterium tumefaciens, for example pBin19 (Bevan et al., Nucl. Acids Res. 12 (1984) 8711). Agrobacteria transformed by such a vector can then be used in known manner for the transformation of plants, such as plants used as a model, like Arabidopsis (Arabidopsis thaliana is within the scope of the present invention not considered as a crop plant), or crop plants such as, by way of example, tobacco plants, for example by immersing bruised leaves or chopped leaves in an agrobacterial solution and then culturing them in suitable media. The transformation of plants by means of Agrobacterium tumefaciens is described, for example, by Höfgen and Willmitzer in Nucl. Acid Res. (1988) 16, 9877 or is known inter alia from F. F. White, Vectors for Gene Transfer in Higher Plants; in Transgenic Plants, Vol. 1, Engineering and Utilization, eds. S. D. Kung and R. Wu, Academic Press, 1993, pp. 15-38.

[0124] In addition to the transformation of somatic cells, which then have to be regenerated into intact plants, it is also possible to transform the cells of plant meristems and in particular those cells which develop into gametes. In this case, the transformed gametes follow the natural plant development, giving rise to transgenic plants. Thus, for example, seeds of Arabidopsis are treated with agrobacteria and seeds are obtained from the developing plants of which a certain proportion is transformed and thus transgenic [Feldman, K A and Marks M D (1987). Mol Gen Genet. 208:274-289; Feldmann K (1992). In: C Koncz, N-H Chua and J Shell, eds, Methods in Arabidopsis Research. Word Scientific, Singapore, pp. 274-289]. Alternative methods are based on the repeated removal of the inflorescences and incubation of the excision site in the center of the rosette with transformed agrobacteria, whereby transformed seeds can likewise be obtained at a later point in time (Chang (1994). Plant J. 5: 551-558; Katavic (1994). Mol Gen Genet, 245: 363-370). However, an especially effective method is the vacuum infiltration method with its modifications such as the “floral dip” method. In the case of vacuum infiltration of Arabidopsis, intact plants under reduced pressure are treated with an agrobacterial suspension [Bechthold, N (1993). C R Acad Sci Paris Life Sci, 316: 1194-1199], while in the case of the “floral dip” method the developing floral tissue is incubated briefly with a surfactant-treated agrobacterial suspension [Clough, S J and Bent A F (1998) The Plant J. 16, 735-743]. A certain proportion of transgenic seeds are harvested in both cases, and these seeds can be distinguished from non-transgenic seeds by growing under the above-described selective conditions. In addition the stable transformation of plastids is of advantages because plastids are inherited maternally is most crops reducing or eliminating the risk of transgene flow through pollen. The transformation of the chloroplast genome is generally achieved by a process which has been schematically displayed in Klaus et al., 2004 [Nature Biotechnology 22 (2), 225-229]. Briefly the sequences to be transformed are cloned together with a selectable marker gene between flanking sequences homologous to the chloroplast genome. These homologous flanking sequences direct site specific integration into the plastome. Plastidal transformation has been described for many different plant species and an overview is given in Bock (2001) Transgenic plastids in basic research and plant biotechnology. J Mol. Biol. 2001 Sep. 21; 312 (3):425-38 or Maliga, P (2003) Progress towards commercialization of plastid transformation technology. Trends Biotechnol. 21, 20-28. Further biotechnological progress has recently been reported in form of marker free plastid transformants, which can be produced by a transient co-integrated maker gene (Klaus et al., 2004, Nature Biotechnology 22(2), 225-229).

### T-DNA Activation Tagging

[0125] T-DNA activation tagging (Hayashi et al. Science (1992) 1350-1353), involves insertion of T-DNA, usually containing a promoter (may also be a translation enhancer or an intron), in the genomic region of the gene of interest or 10 kb up- or downstream of the coding region of a gene in a configuration such that the promoter directs expression of the targeted gene. Typically, regulation of expression of the targeted gene by its natural promoter is disrupted and the gene falls under the control of the newly introduced promoter. The promoter is typically embedded in a T-DNA. This T-DNA is randomly inserted into the plant genome, for example, through Agrobacterium infection and leads to modified expression of genes near the inserted T-DNA. The resulting transgenic plants show dominant phenotypes due to modified expression of genes close to the introduced promoter.

### TILLING

[0126] The term “TILLING” is an abbreviation of “Targeted Induced Local Lesions In Genomes” and refers to a mutagenesis technology useful to generate and/or identify nucleic acids encoding proteins with modified expression and/or activity. TILLING also allows selection of plants carrying such mutant variants. These mutant variants may exhibit modified expression, either in strength or in location or in timing (if the mutations affect the promoter for example). These mutant variants may exhibit higher activity than that exhibited by the gene in its natural form. TILLING combines high-density mutagenesis with high-throughput screening methods. The steps typically followed in TILLING are: (a) EMS mutagenesis (Redei G P and Koncz C (1992) In Methods in Arabidopsis Research, Koncz C, Chua N H, Schell J, eds. Singapore, World Scientific Publishing Co, pp. 16-82; Feldmann et al., (1994) In Meyerowitz E M, Somerville C R, eds, Arabidopsis. Cold Spring Harbor Laboratory Press, Cold Spring Harbor, N.Y., pp 137-172; Lightner J and Caspar T (1998) In J Martinez-Zapater, J Salinas, eds, Methods on Molecular Biology, Vol. 82. Humana Press, Totowa, N.J., pp 91-104); (b) DNA preparation and pooling of individuals; (c) PCR amplification of a region of interest; (d) denaturation and annealing to allow formation of heteroduplexes; (e) DHPLC, where the presence of a heteroduplex in a pool is detected as an extra peak in the chromatogram; (f) identification of the mutant individual; and (g) sequencing of the mutant PCR product. Methods for TILLING are well known in the art (McCallum et at, (2000) Nat Biotechnol 18: 455-457; reviewed by Stemple (2004) Nat Rev Genet. 5(2): 145-50).

### Homologous Recombination

[0127] Homologous recombination allows introduction in a genome of a selected nucleic acid at a defined selected position. Homologous recombination is a standard technology used routinely in biological sciences for lower organisms such as yeast or the moss Physcomitrella. Methods for performing homologous recombination in plants have been described not only for model plants (Offring a et al. (1990) EMBO J. 9(10): 3077-84) but also for crop plants, for example rice (Terada et al. (2002) Nat Biotech 20(10): 1030-4; Iida and Terada (2004) Curr Opin Biotech 15(2): 132-8), and approaches exist that are generally applicable regardless of the target organism (Miller et al, Nature Biotechnol. 25, 778-785, 2007).

### Yield

[0128] The term “yield” in general means a measurable produce of economic value, typically related to a specified crop, to an area, and to a period of time. Individual plant parts directly contribute to yield based on their number, size and/or weight, or the actual yield is the yield per square meter for a crop and year, which is determined by dividing total production (includes both harvested and appraised production) by planted square meters. The term “yield” of a plant may relate to vegetative biomass (root and/or shoot biomass), to reproductive organs, and/or to propagules (such as seeds) of that plant.

### Early Vigour

[0129] “Early vigour” refers to active healthy well-balanced growth especially during early stages of plant growth, and may result from increased plant fitness due to, for example, the plants being better adapted to their environment (i.e. optimizing the use of energy resources and partitioning between shoot and root). Plants having early vigour also show increased seedling survival and a better establishment of the crop, which often results in highly uniform fields (with the crop growing in uniform manner, i.e. with the majority of plants reaching the various stages of development at substantially the same time), and often better and higher yield. Therefore, early vigour may be determined by measuring various factors, such as thousand kernel weight, percentage germination, percentage emergence, seedling growth, seedling height, root length, root and shoot biomass and many more.

### Increase/Improve/Enhance

[0130] The terms “increase”, “improve” or “enhance” are interchangeable and shall mean in the sense of the application at least a 3%, 4%, 5%, 6%, 7%, 8%, 9% or 10%, preferably at least 15% or 20%, more preferably 25%, 30%, 35% or 40% more yield and/or growth in comparison to control plants as defined herein.

### Seed Yield

[0131] Increased seed yield may manifest itself as one or more of the following: a) an increase in seed biomass (total seed weight) which may be on an individual seed basis and/or per plant and/or per square meter; b) increased number of flowers per plant; c) increased number of (filled) seeds; d) increased seed filling rate (which is expressed as the ratio between the number of filled seeds divided by the total number of seeds); e) increased harvest index, which is expressed as a ratio of the yield of harvestable parts, such as seeds, divided by the total biomass; and f) increased thousand kernel weight (TKW), which is extrapolated from the number of filled seeds counted and their total weight. An increased TKW may result from an increased seed size and/or seed weight, and may also result from an increase in embryo and/or endosperm size.

[0132] An increase in seed yield may also be manifested as an increase in seed size and/or seed volume. Furthermore, an increase in seed yield may also manifest itself as an increase in seed area and/or seed length and/or seed width and/or seed perimeter. Increased yield may also result in modified architecture, or may occur because of modified architecture.

### Greenness Index

[0133] The “greenness index” as used herein is calculated from digital images of plants. For each pixel belonging to the plant object on the image, the ratio of the green value versus the red value (in the RGB model for encoding color) is calculated. The greenness index is expressed as the percentage of pixels for which the green-to-red ratio exceeds a given threshold. Under normal growth conditions, under salt stress growth conditions, and under reduced nutrient availability growth conditions, the greenness index of plants is measured in the last imaging before flowering. In contrast, under drought stress growth conditions, the greenness index of plants is measured in the first imaging after drought.

### Plant

[0134] The term “plant” as used herein encompasses whole plants, ancestors and progeny of the plants and plant parts, including seeds, shoots, stems, leaves, roots (including tubers), flowers, and tissues and organs, wherein each of the aforementioned comprise the gene/nucleic acid of interest. The term “plant” also encompasses plant cells, suspension cultures, callus tissue, embryos, meristematic regions, gametophytes, sporophytes, pollen and microspores, again wherein each of the aforementioned comprises the gene/nucleic acid of interest.

[0135] Plants that are particularly useful in the methods of the invention include all plants which belong to the superfamily Viridiplantae, in particular monocotyledonous and dicotyledonous plants including fodder or forage legumes, ornamental plants, food crops, trees or shrubs selected from the list comprising Acer spp., Actinidia spp., Abelmoschus spp., Agave sisalana, Agropyron spp., Agrostis stolonifera, Allium app., Amaranthus spp., Ammophila arenaria, Ananas comosus, Annona app., Apium graveolens, Arachis spp, Artocarpus spp., Asparagus officinalis, Avena spp. (e.g. Avena sativa, Avena fatua, Avena byzantina, Avena fatua var. sativa, Avena hybrida), Averrhoa carambola, Bambusa sp., Benincasa hispida, Bertholletia excelsea, Beta vulgaris, Brassica spp. (e.g. Brassica napus, Brassica rapa ssp. [canola, oilseed rape, turnip rape]), Cadaba farinosa, Camellia sinensis, Canna indica, Cannabis sativa, Capsicum app., Carex elata, Carica papaya, Carissa macrocarpa, Carya spp., Carthamus tinctorius, Castanea spp., Ceiba pentandra, Cichorium endivia, Cinnamomum spp., Citrullus ianatus, Citrus spp., Cocos spp., Coffea spp., Colocasia esculenta, Cola spp., Corchorus sp., Coriandrum sativum, Corylus spp., Crataegus spp., Crocus sativus, Cucurbita app., Cucumis app., Cynara spp., Daucus carols, Desmodium app., Dimocarpus longan, Dioscorea spp., Diospyros spp., Echinochloa spp., Elaeis (e.g. Elaeis guineensis, Elaeis oleifera), Eleusine coracana, Eragrostis tef, Erianthus sp., Eriobotrya japonica, Eucalyptus sp., Eugenia uniflora, Fagopyrum spp., Fagus spp., Festuca arundinacea, Ficus carica, Fortunella spp., Fragaria spp., Ginkgo biloba, Glycine spp. (e.g. Glycine max, Sofa hispida or Sofa max), Gossypium hirsutum, Helianthus spp. (e.g. Helianthus annuus), Hemerocallis fulva, Hibiscus spp., Hordeum spp. (e.g. Hordeum vulgare), Ipomoea batatas, Juglans spp., Lactuca sativa, Lathyrus spp., Lens culinaris, Linum usitatissimum, Litchi chinensis, Lotus spp., Luffa acutangula, Lupinus spp., Luzula sylvatica, Lycopersicon spp. (e.g. Lycopersicon esculentum, Lycopersicon lycopersicum, Lycopersicon pyriforme), Macrotyloma app., Malus spp., Malpighia emarginata, Mammea americana, Mangifera indica, Manihot spp., Manilkara zapota, Medicago sativa, Melilotus spp., Mentha spp., Miscanthus sinensis, Momordica app., Morus nigra, Musa spp., Nicotiana spp., Olea spp., Opuntia spp., Ornithopus spp., Oryza spp. (e.g. Oryza sativa, Oryza latifolia), Panicum millaceum, Panicum virgatum, Passiflora edulis, Pastinaca sativa, Pennisetum sp., Persea spp., Petroselinum crispum, Phalaris arundinacea, Phaseolus spp., Phleum pratense, Phoenix spp., Phragmites australis, Physalis app., Pinus app., Pistacia vera, Pisum spp., Poa spp., Populus spp., Prosopis app., Prunus spp., Psidium spp., Punica granatum, Pyrus communis, Quercus app., Raphanus sativus, Rheum rhabarbarum, Ribes spp., Ricinus communis, Rubus spp., Saccharum spp., Salix sp., Sambucus spp., Secale cereale, Sesamum spp., Sinapis sp., Solanum spp. (e.g. Solanum tuberosum, Solarium integrifolium or Solanum lycopersicum), Sorghum bicolor, Spinacia spp., Syzygium spp., Tagetes spp., Tamarindus indica, Theobroma cacao, Trifolium spp., Tripsacum dactyloides, Triticosecale timpaui, Triticum spp. (e.g. Triticum aestivum, Triticum durum, Triticum turgidum, Triticum hybemum, Triticum macha, Triticum sativum, Triticum monococcum or Triticum vulgare), Tropaeolum minus, Tropaeolum majus, Vaccinium spp., Vida spp., Vigna spp., Viola odorata, Vitis spp., Zea mays, Zizania palustris, Ziziphus spp., amongst others.

### DETAILED DESCRIPTION OF THE INVENTION

### I. LOB-Domain Comprising Protein (LOB: Lateral Organ Boundaries)

[0136] Surprisingly, it has now been found that modulating expression in a plant of a nucleic acid encoding a LBD polypeptide gives plants having enhanced yield-related traits relative to control plants. According to a first embodiment, the present invention provides a method for enhancing yield-related traits in plants relative to control plants, comprising modulating expression in a plant of a nucleic acid encoding a LBD polypeptide.

[0137] A preferred method for modulating (preferably, increasing) expression of a nucleic acid encoding a LBD polypeptide is by introducing and expressing in a plant a nucleic acid encoding a LBD polypeptide.

[0138] Any reference hereinafter to a “protein useful in the methods of the invention” is taken to mean a LBD polypeptide as defined herein. Any reference hereinafter to a “nucleic acid useful in the methods of the invention” is taken to mean a nucleic acid capable of encoding such a LBD polypeptide. The nucleic acid to be introduced into a plant (and therefore useful in performing the methods of the invention) is any nucleic acid encoding the type of protein which will now be described, hereafter also named “LSO nucleic acid” or “LBD gene”.

[0139] A “LBD polypeptide” as defined herein refers to any polypeptide comprising a DUF260 domain (Pfam accession number PF03195, Interpro accession number IPR004883, see FIG. 1). Preferably, the LBD polypeptide sequence, when used in the construction of a phylogenetic tree such as the one depicted in FIG. 3 (or as defined by Yang et al., 2006, using the HKY method (Hasegawa et al., J. Mol. Evol. 22, 160-174, 1985)), clusters with the group of class II LOB domain polypeptides comprising the amino acid sequence represented by SEQ ID NO: 2 rather than with any other group.

[0140] Further preferably, the LBD protein comprises at least one of the following conserved motifs:

Motif 1: MSCNGCRXLRKGCX (SEQ ID NO: 5); wherein X on position 8 may be any amino acid, but preferably V or I and wherein X on position 14 may be any amino acid, but preferably is one of S, G or N.
Motif 2: QXXATXFXAKFXGR (SEQ ID NO: 6), wherein X on position 2 may be any amino acid, but preferably one of A, 5, or G; wherein X on position 3 may be any amino acid, but preferably one of N, Q, or H; wherein X on position 6 may be any amino acid, but preferably one of V, L, or I; wherein X on position 8 may be any amino acid, but preferably one of L, V, A, or I; and wherein X on position 12 may be any amino acid, but preferably one of Y or F.
Motif 3: FXSLLXEAXG (SEQ ID NO: 7); wherein X on position 2 may be any amino acid, but preferably one of R, S, K, or Q; wherein X on position 6 may be any amino acid, but preferably one of Y, H, or F; and wherein X on position 9 may be any amino acid, but preferably C or A.

[0141] Further preferably, the LBD protein comprises more than seven, more preferably at least nine Cys residues, and does not comprise the DP(V/I)YG signature (SEQ ID NO: 8).

[0142] The DUF260 domain is characterised by the presence of a C-x(2)-C-x(6)-C-x(3)-C motif (SEQ ID NO: 9), wherein X may be any amino acid.

[0143] The term “domain” and “motif” is defined in the “definitions” section herein. Specialist databases exist for the identification of domains, for example, SMART (Schultz et al. (1998) Proc. Natl. Acad. Sci. USA 95, 5857-5864; Letunic et al. (2002) Nucleic Acids Res 30, 242-244, InterPro (Mulder et al., (2003) Nucl. Acids. Res. 31, 315-318, Prosite (Bucher and Bairoch (1994), A generalized profile syntax for biomolecular sequences motifs and its function in automatic sequence interpretation. (In) ISMB-94; Proceedings 2nd International Conference on Intelligent Systems for Molecular Biology. Altman R., Brutlag D., Karp P., Lathrop R., Searls D., Eds., pp 53-61, AAAI Press, Menlo Park; Hulo et al., Nucl. Acids. Res. 32:D134-D137, (2004), or Pfam (Bateman et al., Nucleic Acids Research 30(1): 276-280 (2002). A set of tools for in silica analysis of protein sequences is available on the ExPASy proteomics server (Swiss Institute of Bioinformatics (Gasteiger et al., ExPASy: the proteomics server for in-depth protein knowledge and analysis, Nucleic Acids Res. 31:3784-3788 (2003)). Domains may also be identified using routine techniques, such as by sequence alignment.

[0144] Methods for the alignment of sequences for comparison are well known in the art, such methods include GAP, BESTFIT, BLAST, FASTA and TFASTA. GAP uses the algorithm of Needleman and Wunsch ((1970) J Mol Biol 48: 443-453) to find the global (i.e. spanning the complete sequences) alignment of two sequences that maximizes the number of matches and minimizes the number of gaps. The BLAST algorithm (Altschul et al. (1990) J Mol Biol 215: 403-10) calculates percent sequence identity and performs a statistical analysis of the similarity between the two sequences. The software for performing BLAST analysis is publicly available through the National Centre for Biotechnology Information (NCBI). Homologues may readily be identified using, for example, the ClustalW multiple sequence alignment algorithm (version 1.83), with the default pairwise alignment parameters, and a scoring method in percentage. Global percentages of similarity and identity may also be determined using one of the methods available in the MatGAT software package (Campanella et al., BMC Bioinformatics. 2003 Jul. 10; 4:29. MatGAT: an application that generates similarity/identity matrices using protein or DNA sequences). Minor manual editing may be performed to optimise alignment between conserved motifs, as would be apparent to a person skilled in the art. Furthermore, instead of using full-length sequences for the identification of homologues, specific domains may also be used. The sequence identity values may be determined over the entire nucleic acid or amino acid sequence or over selected domains or conserved motif(s), using the programs mentioned above using the default parameters.

[0145] Furthermore, LBD polypeptides (at least in their native form), as transcription factors, typically have DNA binding activity. Tools and techniques for measuring DNA binding activity are well known in the art and include for example gel retardation assays. Experimental approaches for characterising activity of transcription factors may be found for example in Sambrook et al. (2001) Molecular Cloning: a laboratory manual, 3rd Edition Cold Spring Harbor Laboratory Press, CSH, New York, or in Volumes 1 and 2 of Ausubel et al. (yearly updated), Current Protocols in Molecular Biology, Current Protocols.

[0146] The present invention is illustrated by transforming plants with the nucleic acid sequence represented by SEQ ID NO: 1, encoding the polypeptide sequence of SEQ ID NO: 2. However, performance of the invention is not restricted to these sequences; the methods of the invention may advantageously be performed using any LBD-encoding nucleic acid or LBD polypeptide as defined herein.

[0147] Examples of nucleic acids encoding LBD polypeptides are given in Table A1 of Example 1 herein. Such nucleic acids are useful in performing the methods of the invention. The amino acid sequences given in Table A1 of Example 1 are example sequences of orthologues and paralogues of the LBD polypeptide represented by SEQ ID NO: 2, the terms “orthologues” and “paralogues” being as defined herein. Further orthologues and paralogues may readily be identified by performing a so-called reciprocal blast search. Typically, this involves a first BLAST involving BLASTing a query sequence (for example using any of the sequences listed in Table A1 of Example 1) against any sequence database, such as the publicly available NCBI database. BLASTN or TBLASTX (using standard default values) are generally used when starting from a nucleotide sequence, and BLASTP or TBLASTN (using standard default values) when starting from a protein sequence. The BLAST results may optionally be filtered. The full-length sequences of either the filtered results or non-filtered results are then BLASTed back (second BLAST) against sequences from the organism from which the query sequence is derived (where the query sequence is SEQ ID NO: 1 or SEQ ID NO: 2, the second BLAST would therefore be against Arabidopsis sequences). The results of the first and second BLASTs are then compared. A paralogue is identified if a high-ranking hit from the first blast is from the same species as from which the query sequence is derived, a BLAST back then ideally results in the query sequence amongst the highest hits; an orthologue is identified if a high-ranking hit in the first BLAST is not from the same species as from which the query sequence is derived, and preferably results upon BLAST back in the query sequence being among the highest hits.

[0148] High-ranking hits are those having a low E-value. The lower the E-value, the more significant the score (or in other words the lower the chance that the hit was found by chance). Computation of the E-value is well known in the art. In addition to E-values, comparisons are also scored by percentage identity. Percentage identity refers to the number of identical nucleotides (or amino acids) between the two compared nucleic acid (or polypeptide) sequences over a particular length. In the case of large families, ClustalW may be used, followed by a neighbour joining tree, to help visualize clustering of related genes and to identify orthologues and paralogues.

[0149] Nucleic acid variants may also be useful in practising the methods of the invention. Examples of such variants include nucleic acids encoding homologues and derivatives of any one of the amino acid sequences given in Table A1 of Example 1, the terms “homologue” and “derivative” being as defined herein. Also useful in the methods of the invention are nucleic acids encoding homologues and derivatives of orthologues or paralogues of any one of the amino acid sequences given in Table A1 of Example 1. Homologues and derivatives useful in the methods of the present invention have substantially the same biological and functional activity as the unmodified protein from which they are derived.

[0150] Further nucleic acid variants useful in practising the methods of the invention include portions of nucleic acids encoding LBD polypeptides, nucleic acids hybridising to nucleic acids encoding LBD polypeptides, splice variants of nucleic acids encoding LBD polypeptides, allelic variants of nucleic acids encoding LBD polypeptides and variants of nucleic acids encoding LBD polypeptides obtained by gene shuffling. The terms hybridising sequence, splice variant, allelic variant and gene shuffling are as described herein.

[0151] Advantageously, the present invention provides hitherto unknown LBD nucleic acid and polypeptide sequences.

[0152] According to a further embodiment of the present invention, there is provided an isolated nucleic acid molecule comprising:
[0153] (i) a nucleic acid represented by SEQ ID NO: 69;
[0154] (ii) a nucleic acid or fragment thereof that is complementary to any one of the SEQ ID NOs given in (i);
[0155] (iii) a nucleic acid encoding a LBD polypeptide having, in increasing order of preference, at least 60%, 65%, 70%, 75%, 80%, 85%, 90%, 95%, 96%, 97%, 98%, 99% or more sequence identity to SEQ ID NO: 70;
[0156] (iv) a nucleic acid capable of hybridizing under stringent conditions to any one of the nucleic acids given in (i), (ii) or (iii) above.

[0157] According to a further embodiment of the present invention, there is therefore provided an isolated polypeptide comprising:
[0158] (i) an amino acid sequence having, in increasing order of preference, at least 60%, 65%, 70%, 75%, 80%, 85%, 90%, 95%, 96%, 97%, 98%, 99% or 100% sequence identity to the amino acid sequence given in SEQ ID NO: 70.
[0159] (ii) derivatives of any of the amino acid sequences given in (i).

[0160] Nucleic acids encoding LBD polypeptides need not be full-length nucleic acids, since performance of the methods of the invention does not rely on the use of full-length nucleic acid sequences. According to the present invention, there is provided a method for enhancing yield-related traits in plants, comprising introducing and expressing in a plant a portion of any one of the nucleic acid sequences given in Table A1 of Example 1, or a portion of a nucleic acid encoding an orthologue, paralogue or homologue of any of the amino acid sequences given in Table A1 of Example 1.

[0161] A portion of a nucleic acid may be prepared, for example, by making one or more deletions to the nucleic acid. The portions may be used in isolated form or they may be fused to other coding (or non-coding) sequences in order to, for example, produce a protein that combines several activities. When fused to other coding sequences, the resultant polypeptide produced upon translation may be bigger than that predicted for the protein portion.

[0162] Portions useful in the methods of the invention, encode a LBD polypeptide as defined herein, and have substantially the same biological activity as the amino acid sequences given in Table A1 of Example 1. Preferably, the portion is a portion of any one of the nucleic acids given in Table A1 of Example 1, or is a portion of a nucleic acid encoding an orthologue or paralogue of any one of the amino acid sequences given in Table A1 of Example 1. Preferably the portion is at least 500, 550, 600, 650, 700, 750, 800, 850, 900, 950, 1000-consecutive nucleotides in length, the consecutive nucleotides being of any one of the nucleic acid sequences given in Table A1 of Example 1, or of a nucleic acid encoding an orthologue or paralogue of any one of the amino acid sequences given in Table A1 of Example 1. Most preferably the portion is a portion of the nucleic acid of SEQ ID NO: 1. Preferably, the portion encodes an amino acid sequence which when used in the construction of a phylogenetic tree such as the one depicted in FIG. 3 (or as defined by Yang et al., 2006, using the HKY method (Hasegawa et al., J. Mol. Evol. 22, 160-174, 1985)), clusters with the group of class II LOB domain polypeptides comprising the amino acid sequence represented by SEQ ID NO: 2 rather than with any other group.

[0163] Another nucleic acid variant useful in the methods of the invention is a nucleic acid capable of hybridising, under reduced stringency conditions, preferably under stringent conditions, with a nucleic acid encoding a LBD polypeptide as defined herein, or with a portion as defined herein.

[0164] According to the present invention, there is provided a method for enhancing yield-related traits in plants, comprising introducing and expressing in a plant a nucleic acid capable of hybridizing to any one of the nucleic acids given in Table A1 of Example 1, or comprising introducing and expressing in a plant a nucleic acid capable of hybridising to a nucleic acid encoding an orthologue, paralogue or homologue of any of the nucleic acid sequences given in Table A1 of Example 1.

[0165] Hybridising sequences useful in the methods of the invention encode a LBD polypeptide as defined herein, and have substantially the same biological activity as the amino acid sequences given in Table A1 of Example 1. Preferably, the hybridising sequence is capable of hybridising to any one of the nucleic acids given in Table A1 of Example 1, or to a portion of any of these sequences, a portion being as defined above, or wherein the hybridising sequence is capable of hybridising to a nucleic acid encoding an orthologue or paralogue of any one of the amino acid sequences given in Table A1 of Example 1. Most preferably, the hybridising sequence is capable of hybridising to a nucleic acid as represented by SEQ ID NO: 1 or to a portion thereof.

[0166] Preferably, the hybridising sequence encodes an amino acid sequence which when used in the construction of a phylogenetic tree such as the one depicted in FIG. 3 (or as defined by Yang at al., 2006, using the HKY method (Hasegawa et al., J. MeI. Evol. 22, 160-174, 1985)), clusters with the group of class II LOB domain polypeptides comprising the amino acid sequence represented by SEQ ID NO: 2 rather than with any other group.

[0167] Another nucleic acid variant useful in the methods of the invention is a splice variant encoding a LBD polypeptide as defined hereinabove, a splice variant being as defined herein.

[0168] According to the present invention, there is provided a method for enhancing yield-related traits in plants, comprising introducing and expressing in a plant a splice variant of any one of the nucleic acid sequences given in Table A1 of Example 1, or a splice variant of a nucleic acid encoding an orthologue, paralogue or homologue of any of the amino acid sequences given in Table A1 of Example 1.

[0169] Preferred splice variants are splice variants of a nucleic acid represented by SEQ ID NO: 1, or a splice variant of a nucleic acid encoding an orthologue or paralogue of SEQ ID NO: 2. Preferably, the amino acid sequence encoded by the splice variant, when used in the construction of a phylogenetic tree such as the one depicted in FIG. 3 (or as defined by Yang at al., 2006, using the HKY method (Hasegawa et al., J. Mol. Evol. 22, 160-174, 1985)), clusters with the group of class II LOB domain polypeptides comprising the amino acid sequence represented by SEQ ID NO: 2 rather than with any other group.

[0170] Another nucleic acid variant useful in performing the methods of the invention is an allelic variant of a nucleic acid encoding a LBD polypeptide as defined hereinabove, an allelic variant being as defined herein.

[0171] According to the present invention, there is provided a method for enhancing yield-related traits in plants, comprising introducing and expressing in a plant an allelic variant of any one of the nucleic acids given in Table A1 of Example 1, or comprising introducing and expressing in a plant an allelic variant of a nucleic acid encoding an orthologue, paralogue or homologue of any of the amino acid sequences given in Table A1 of Example 1.

[0172] The allelic variants useful in the methods of the present invention have substantially the same biological activity as the LBD polypeptide of SEQ ID NO: 2 and any of the amino acids depicted in Table A1 of Example 1. Allelic variants exist in nature, and encompassed within the methods of the present invention is the use of these natural alleles. Preferably, the allelic variant is an allelic variant of SEQ ID NO: 1 or an allelic variant of a nucleic acid encoding an orthologue or paralogue of SEQ ID NO: 2. Preferably, the amino acid sequence encoded by the allelic variant, when used in the construction of a phylogenetic tree such as the one depicted in FIG. 3 (or as defined by Yang et al., 2006, using the HKY method (Hasegawa et al., J. Mol. Evol. 22, 160-174, 1985)), clusters with the group of class II LOB domain polypeptides comprising the amino acid sequence represented by SEQ ID NO: 2 rather than with any other group.

[0173] Gene shuffling or directed evolution may also be used to generate variants of nucleic acids encoding LBD polypeptides as defined above; the term “gene shuffling” being as defined herein.

[0174] According to the present invention, there is provided a method for enhancing yield-related traits in plants, comprising introducing and expressing in a plant a variant of any one of the nucleic acid sequences given in Table A1 of Example 1, or comprising introducing and expressing in a plant a variant of a nucleic acid encoding an orthologue, paralogue or homologue of any of the amino acid sequences given in Table A1 of Example 1, which variant nucleic acid is obtained by gene shuffling.

[0175] Preferably, the amino acid sequence encoded by the variant nucleic acid obtained by gene shuffling, when used in the construction of a phylogenetic tree such as the one depicted in FIG. 3 (or as defined by Yang et al., 2006, using the HKY method (Hasegawa et al., J. Mol. Evol. 22, 160-174, 1985)), clusters with the group of class II LOB domain polypeptides comprising the amino acid sequence represented by SEQ ID NO: 2 rather than with any other group.

[0176] Furthermore, nucleic acid variants may also be obtained by site-directed mutagenesis. Several methods are available to achieve site-directed mutagenesis, the most common being PCR based methods (Current Protocols in Molecular Biology. Wiley Eds.).

[0177] Nucleic acids encoding LBD polypeptides may be derived from any natural or artificial source. The nucleic acid may be modified from its native form in composition and/or genomic environment through deliberate human manipulation. Preferably the LBD polypeptide-encoding nucleic acid is from a plant, further preferably from a dicotyledonous plant, more preferably from the family Brassicaceae, most preferably the nucleic acid is from Arabidopsis thaliana.

[0178] Performance of the methods of the invention gives plants having enhanced yield-related traits. In particular performance of the methods of the invention gives plants having increased yield, especially increased seed yield relative to control plants. The terms “yield” and “seed yield” are described in more detail in the “definitions” section herein.

[0179] Reference herein to enhanced yield-related traits is taken to mean an increase in biomass (weight) of one or more parts of a plant, which may include aboveground (harvestable) parts and/or (harvestable) parts below ground. In particular, such aboveground harvestable parts are shoot biomass and seeds, and performance of the methods of the invention results in plants having increased shoot biomass and seed yield relative to the shoot biomass and seed yield of control plants.

[0180] Taking corn as an example, a yield increase may be manifested as one or more of the following: increase in the number of plants established per hectare or acre, an increase in the number of ears per plant, an increase in the number of rows, number of kernels per row, kernel weight, thousand kernel weight, ear length/diameter, increase in the seed filling rate (which is the number of filled seeds divided by the total number of seeds and multiplied by 100), among others. Taking rice as an example, a yield increase may manifest itself as an increase in one or more of the following: number of plants per hectare or acre, number of panicles per plant, number of spikelets per panicle, number of flowers (florets) per panicle (which is expressed as a ratio of the number of filled seeds over the number of primary panicles), increase in the seed filling rate (which is the number of filled seeds divided by the total number of seeds and multiplied by 100), increase in thousand kernel weight, among others.

[0181] The present invention provides a method for increasing yield, especially shoot biomass yield and seed yield of plants, relative to control plants, which method comprises modulating expression, preferably increasing expression, in a plant of a nucleic acid encoding a LBD polypeptide as defined herein.

[0182] Since the transgenic plants according to the present invention have increased yield, it is likely that these plants exhibit an increased growth rate (during at least part of their life cycle), relative to the growth rate of control plants at a corresponding stage in their life cycle.

[0183] The increased growth rate may be specific to one or more parts of a plant (including seeds), or may be throughout substantially the whole plant. Plants having an increased growth rate may have a shorter life cycle. The life cycle of a plant may be taken to mean the time needed to grow from a dry mature seed up to the stage where the plant has produced dry mature seeds, similar to the starting material. This life cycle may be influenced by factors such as early vigour, growth rate, greenness index, flowering time and speed of seed maturation. The increase in growth rate may take place at one or more stages in the life cycle of a plant or during substantially the whole plant life cycle. Increased growth rate during the early stages in the life cycle of a plant may reflect enhanced vigour. The increase in growth rate may alter the harvest cycle of a plant allowing plants to be sown later and/or harvested sooner than would otherwise be possible (a similar effect may be obtained with earlier flowering time). If the growth rate is sufficiently increased, it may allow for the further sowing of seeds of the same plant species (for example sowing and harvesting of rice plants followed by sowing and harvesting of further rice plants all within one conventional growing period). Similarly, if the growth rate is sufficiently increased, it may allow for the further sowing of seeds of different plants species (for example the sowing and harvesting of corn plants followed by, for example, the sowing and optional harvesting of soybean, potato or any other suitable plant). Harvesting additional times from the same rootstock in the case of some crop plants may also be possible. Altering the harvest cycle of a plant may lead to an increase in annual biomass production per acre (due to an increase in the number of times (say in a year) that any particular plant may be grown and harvested). An increase in growth rate may also allow for the cultivation of transgenic plants in a wider geographical area than their wild-type counterparts, since the territorial limitations for growing a crop are often determined by adverse environmental conditions either at the time of planting (early season) or at the time of harvesting (late season). Such adverse conditions may be avoided if the harvest cycle is shortened. The growth rate may be determined by deriving various parameters from growth curves, such parameters may be: T-Mid (the time taken for plants to reach 50% of their maximal size) and T-90 (time taken for plants to reach 90% of their maximal size), amongst others.

[0184] According to a preferred feature of the present invention, performance of the methods of the invention gives plants having an increased growth rate relative to control plants. Therefore, according to the present invention, there is provided a method for increasing the growth rate of plants, which method comprises modulating expression, preferably increasing expression, in a plant of a nucleic acid encoding a LBD polypeptide as defined herein. In particular, an increase in growth rate was observed during the early growth stages of the plant (early vigour).

[0185] An increase in yield and/or growth rate occurs whether the plant is under non-stress conditions or whether the plant is exposed to various stresses compared to control plants. Plants typically respond to exposure to stress by growing more slowly. In conditions of severe stress, the plant may even stop growing altogether. Mild stress on the other hand is defined herein as being any stress to which a plant is exposed which does not result in the plant ceasing to grow altogether without the capacity to resume growth. Mild stress in the sense of the invention leads to a reduction in the growth of the stressed plants of less than 40%, 35% or 30%, preferably less than 25%, 20% or 15%, more preferably less than 14%, 13%, 12%, 11% or 10% or less in comparison to the control plant under non-stress conditions. Due to advances in agricultural practices (irrigation, fertilization, pesticide treatments) severe stresses are not often encountered in cultivated crop plants. As a consequence, the compromised growth induced by mild stress is often an undesirable feature for agriculture. Mild stresses are the everyday biotic and/or abiotic (environmental) stresses to which a plant is exposed. Abiotic stresses may be due to drought or excess water, anaerobic stress, salt stress, chemical toxicity, oxidative stress and hot, cold or freezing temperatures. The abiotic stress may be an osmotic stress caused by a water stress (particularly due to drought), salt stress, oxidative stress or an ionic stress. Biotic stresses are typically those stresses caused by pathogens, such as bacteria, viruses, fungi and insects.

[0186] In particular, the methods of the present invention may be performed under non-stress conditions or under conditions of mild drought to give plants having increased yield relative to control plants. As reported in Wang et al. (Planta (2003) 218: 1-14), abiotic stress leads to a series of morphological, physiological, biochemical and molecular changes that adversely affect plant growth and productivity. Drought, salinity, extreme temperatures and oxidative stress are known to be interconnected and may induce growth and cellular damage through similar mechanisms. Rabbani et al. (Plant Physiol (2003) 133: 1755-1767) describes a particularly high degree of “cross talk” between drought stress and high-salinity stress. For example, drought and/or salinisation are manifested primarily as osmotic stress, resulting in the disruption of homeostasis and ion distribution in the cell. Oxidative stress, which frequently accompanies high or low temperature, salinity or drought stress, may cause denaturing of functional and structural proteins. As a consequence, these diverse environmental stresses often activate similar cell signalling pathways and cellular responses, such as the production of stress proteins, up-regulation of anti-oxidants, accumulation of compatible solutes and growth arrest. The term “non-stress” conditions as used herein are those environmental conditions that allow optimal growth of plants. Persons skilled in the art are aware of normal soil conditions and climatic conditions for a given location. Plants with optimal growth conditions, (grown under non-stress conditions) typically yield in increasing order of preference at least 90%, 87%, 85%, 83%, 80%, 77% or 75% of the average production of such plant in a given environment. Average production may be calculated on harvest and/or season basis. Persons skilled in the art are aware of average yield productions of a crop.

[0187] Performance of the methods of the invention gives plants grown under non-stress conditions or under mild drought conditions increased yield relative to control plants grown under comparable conditions. Therefore, according to the present invention, there is provided a method for increasing yield in plants grown under non-stress conditions or under mild drought conditions, which method comprises increasing expression in a plant of a nucleic acid encoding a LBD polypeptide.

[0188] Performance of the methods of the invention gives plants grown under conditions of nutrient deficiency, particularly under conditions of nitrogen deficiency, increased early vigour and increased yield relative to control plants grown under comparable conditions. Therefore, according to the present invention, there is provided a method for increasing early vigour and yield in plants grown under conditions of nutrient deficiency, which method comprises increasing expression in a plant of a nucleic acid encoding a LBD polypeptide. Nutrient deficiency may result from a lack or excess of nutrients such as nitrogen, phosphates and other phosphorous-containing compounds, potassium, calcium, cadmium, magnesium, manganese, iron and boron, amongst others.

[0189] The present invention encompasses plants or parts thereof (including seeds) obtainable by the methods according to the present invention. The plants or parts thereof comprise a nucleic acid transgene encoding a LBD polypeptide as defined above.

[0190] The invention also provides genetic constructs and vectors to facilitate introduction and/or expression in plants of nucleic acids encoding LBD polypeptides. The gene constructs may be inserted into vectors, which may be commercially available, suitable for transforming into plants and suitable for expression of the gene of interest in the transformed cells. The invention also provides use of a gene construct as defined herein in the methods of the invention.

[0191] More specifically, the present invention provides a construct comprising:
[0192] (a) a nucleic acid encoding a LBD polypeptide as defined above;
[0193] (b) one or more control sequences capable of driving expression of the nucleic acid sequence of (a); and optionally
[0194] (c) a transcription termination sequence.

[0195] Preferably, the nucleic acid encoding a LBD polypeptide is as defined above. The term “control sequence” and “termination sequence” are as defined herein.

[0196] Plants are transformed with a vector comprising any of the nucleic acids described above. The skilled artisan is well aware of the genetic elements that must be present on the vector in order to successfully transform, select and propagate host cells containing the sequence of interest. The sequence of interest is operably linked to one or more control sequences (at least to a promoter).

[0197] Advantageously, any type of promoter, whether natural or synthetic, may be used to drive expression of the nucleic acid sequence. A constitutive promoter is particularly useful in the methods. See the “Definitions” section herein for definitions of the various promoter types.

[0198] It should be clear that the applicability of the present invention is not restricted to the LBD polypeptide-encoding nucleic acid represented by SEQ ID NO: 1, nor is the applicability of the invention restricted to expression of a LBD polypeptide-encoding nucleic acid when driven by a constitutive promoter.

[0199] The constitutive promoter is preferably a GOS2 promoter, preferably a GOS2 promoter from rice. Further preferably the constitutive promoter is represented by a nucleic acid sequence substantially similar to SEQ ID NO: 10, most preferably the constitutive promoter is as represented by SEQ ID NO: 10. See the “Definitions” section herein for further examples of constitutive promoters.

[0200] Optionally, one or more terminator sequences may be used in the construct introduced into a plant. Additional regulatory elements may include transcriptional as well as translational enhancers. Those skilled in the art will be aware of terminator and enhancer sequences that may be suitable for use in performing the invention. An intron sequence may also be added to the 5′ untranslated region (UTR) or in the coding sequence to increase the amount of the mature message that accumulates in the cytosol, as described in the definitions section. Other control sequences (besides promoter, enhancer, silencer, intron sequences, 3′UTR and/or 5′UTR regions) may be protein and/or RNA stabilizing elements. Such sequences would be known or may readily be obtained by a person skilled in the art.

[0201] The genetic constructs of the invention may further include an origin of replication sequence that is required for maintenance and/or replication in a specific cell type. One example is when a genetic construct is required to be maintained in a bacterial cell as an episomal genetic element (e.g. plasmid or cosmid molecule). Preferred origins of replication include, but are not limited to, the f1-ori and colE1.

[0202] For the detection of the successful transfer of the nucleic acid sequences as used in the methods of the invention and/or selection of transgenic plants comprising these nucleic acids, it is advantageous to use marker genes (or reporter genes). Therefore, the genetic construct may optionally comprise a selectable marker gene. Selectable markers are described in more detail in the “definitions” section herein.

[0203] It is known that upon stable or transient integration of nucleic acids into plant cells, only a minority of the cells takes up the foreign DNA and, if desired, integrates it into its genome, depending on the expression vector used and the transfection technique used. To identify and select these integrants, a gene coding for a selectable marker (such as the ones described above) is usually introduced into the host cells together with the gene of interest. These markers can for example be used in mutants in which these genes are not functional by, for example, deletion by conventional methods. Furthermore, nucleic acid molecules encoding a selectable marker can be introduced into a host cell on the same vector that comprises the sequence encoding the polypeptides of the invention or used in the methods of the invention, or else in a separate vector. Cells which have been stably transfected with the introduced nucleic acid can be identified for example by selection (for example, cells which have integrated the selectable marker survive whereas the other cells die). The marker genes may be removed or excised from the transgenic cell once they are no longer needed. Techniques for marker gene removal are known in the art, useful techniques are described above in the definitions section.

[0204] The invention also provides a method for the production of transgenic plants having enhanced yield-related traits relative to control plants, comprising introduction and expression in a plant of any nucleic acid encoding a LBD polypeptide as defined hereinabove.

[0205] More specifically, the present invention provides a method for the production of transgenic plants having increased enhanced yield-related traits, particularly increased shoot biomass and increased seed yield, which method comprises:
[0206] (i) introducing and expressing in a plant or plant cell a LBD polypeptide-encoding nucleic acid; and
[0207] (ii) cultivating the plant cell under conditions promoting plant growth and development.

[0208] The nucleic acid of (i) may be any of the nucleic acids capable of encoding a LBD polypeptide as defined herein.

[0209] The nucleic acid may be introduced directly into a plant cell or into the plant itself (including introduction into a tissue, organ or any other part of a plant). According to a preferred feature of the present invention, the nucleic acid is preferably introduced into a plant by transformation. The term “transformation” is described in more detail in the “definitions” section herein.

[0210] The genetically modified plant cells can be regenerated via all methods with which the skilled worker is familiar. Suitable methods can be found in the abovementioned publications by S. D. Kung and R. Wu, Potrykus or Hagen and Willmitzer.

[0211] Generally after transformation, plant cells or cell groupings are selected for the presence of one or more markers which are encoded by plant-expressible genes co-transferred with the gene of interest, following which the transformed material is regenerated into a whole plant. To select transformed plants, the plant material obtained in the transformation is, as a rule, subjected to selective conditions so that transformed plants can be distinguished from untransformed plants. For example, the seeds obtained in the above-described manner can be planted and, after an initial growing period, subjected to a suitable selection by spraying. A further possibility consists in growing the seeds, if appropriate after sterilization, on agar plates using a suitable selection agent so that only the transformed seeds can grow into plants. Alternatively, the transformed plants are screened for the presence of a selectable marker such as the ones described above.

[0212] Following DNA transfer and regeneration, putatively transformed plants may also be evaluated, for instance using Southern analysis, for the presence of the gene of interest, copy number and/or genomic organisation. Alternatively or additionally, expression levels of the newly introduced DNA may be monitored using Northern and/or Western analysis, both techniques being well known to persons having ordinary skill in the art.

[0213] The generated transformed plants may be propagated by a variety of means, such as by clonal propagation or classical breeding techniques. For example, a first generation (or T1) transformed plant may be selfed and homozygous second-generation (or T2) transformants selected, and the T2 plants may then further be propagated through classical breeding techniques. The generated transformed organisms may take a variety of forms. For example, they may be chimeras of transformed cells and non-transformed cells; clonal transformants (e.g., all cells transformed to contain the expression cassette); grafts of transformed and untransformed tissues (e.g., in plants, a transformed rootstock grafted to an untransformed scion).

[0214] The present invention clearly extends to any plant cell or plant produced by any of the methods described herein, and to all plant parts and propagules thereof. The present invention extends further to encompass the progeny of a primary transformed or transfected cell, tissue, organ or whole plant that has been produced by any of the aforementioned methods, the only requirement being that progeny exhibit the same genotypic and/or phenotypic characteristic(s) as those produced by the parent in the methods according to the invention.

[0215] The invention also includes host cells containing an isolated nucleic acid encoding a LBD polypeptide as defined hereinabove. Preferred host cells according to the invention are plant cells. Host plants for the nucleic acids or the vector used in the method according to the invention, the expression cassette or construct or vector are, in principle, advantageously all plants, which are capable of synthesizing the polypeptides used in the inventive method.

[0216] The methods of the invention are advantageously applicable to any plant. Plants that are particularly useful in the methods of the invention include all plants which belong to the superfamily Viridiplantae, in particular monocotyledonous and dicotyledonous plants including fodder or forage legumes, ornamental plants, food crops, trees or shrubs. According to a preferred embodiment of the present invention, the plant is a crop plant. Examples of crop plants include soybean, sunflower, canola, alfalfa, rapeseed, cotton, tomato, potato and tobacco. Further preferably, the plant is a monocotyledonous plant. Examples of monocotyledonous plants include sugarcane. More preferably the plant is a cereal. Examples of cereals include rice, maize, wheat, barley, millet, rye, triticale, sorghum and oats.

[0217] The invention also extends to harvestable parts of a plant such as, but not limited to seeds, leaves, fruits, flowers, stems, rhizomes, tubers and bulbs. The invention furthermore relates to products derived, preferably directly derived, from a harvestable part of such a plant, such as dry pellets or powders, oil, fat and fatty acids, starch or proteins.

[0218] According to a preferred feature of the invention, the modulated expression is increased expression. Methods for increasing expression of nucleic acids or genes, or gene products, are well documented in the art and examples are provided in the definitions section.

[0219] As mentioned above, a preferred method for modulating (preferably, increasing) expression of a nucleic acid encoding a LBD polypeptide is by introducing and expressing in a plant a nucleic acid encoding a LBD polypeptide; however the effects of performing the method, i.e. enhancing yield-related traits may also be achieved using other well known techniques, including but not limited to T-DNA activation tagging, TILLING, homologous recombination. A description of these techniques is provided in the definitions section.

[0220] The present invention also encompasses use of nucleic acids encoding LBD polypeptides as described herein and use of these LBD polypeptides in enhancing any of the aforementioned yield-related traits in plants.

[0221] Nucleic acids encoding LBD polypeptide described herein, or the LBD polypeptides themselves, may find use in breeding programmes in which a DNA marker is identified which may be genetically linked to a LBD polypeptide-encoding gene. The nucleic acids/genes, or the LAD polypeptides themselves may be used to define a molecular marker. This DNA or protein marker may then be used in breeding programmes to select plants having enhanced yield-related traits as defined hereinabove in the methods of the invention.

[0222] Allelic variants of a LBD polypeptide-encoding nucleic acid/gene may also find use in marker-assisted breeding programmes. Such breeding programmes sometimes require introduction of allelic variation by mutagenic treatment of the plants, using for example EMS mutagenesis; alternatively, the programme may start with a collection of allelic variants of so called “natural” origin caused unintentionally. Identification of allelic variants then takes place, for example, by PCR. This is followed by a step for selection of superior allelic variants of the sequence in question and which give increased yield. Selection is typically carried out by monitoring growth performance of plants containing different allelic variants of the sequence in question. Growth performance may be monitored in a greenhouse or in the field. Further optional steps include crossing plants in which the superior allelic variant was identified with another plant. This could be used, for example, to make a combination of interesting phenotypic features.

[0223] Nucleic acids encoding LAD polypeptides may also be used as probes for genetically and physically mapping the genes that they are a part of, and as markers for traits linked to those genes. Such information may be useful in plant breeding in order to develop lines with desired phenotypes. Such use of LAD polypeptide-encoding nucleic acids requires only a nucleic acid sequence of at least 15 nucleotides in length. The LAD polypeptide-encoding nucleic acids may be used as restriction fragment length polymorphism (RFLP) markers. Southern blots (Sambrook J, Fritsch E F and Maniatis T (1989) Molecular Cloning, A Laboratory Manual) of restriction-digested plant genomic DNA may be probed with the LBD-encoding nucleic acids. The resulting banding patterns may then be subjected to genetic analyses using computer programs such as MapMaker (Lander at al. (1987) Genomics 1: 174-181) in order to construct a genetic map. In addition, the nucleic acids may be used to probe Southern blots containing restriction endonuclease-treated genomic DNAs of a set of individuals representing parent and progeny of a defined genetic cross. Segregation of the DNA polymorphisms is noted and used to calculate the position of the LBD polypeptide-encoding nucleic acid in the genetic map previously obtained using this population (Botstein et al. (1980) Am. J. Hum. Genet. 32:314-331).

[0224] The production and use of plant gene-derived probes for use in genetic mapping is described in Bernatzky and Tanksley (1986) Plant Mol. Biol. Reporter 4: 37-41. Numerous publications describe genetic mapping of specific cDNA clones using the methodology outlined above or variations thereof. For example, F2 intercross populations, backcross populations, randomly mated populations, near isogenic lines, and other sets of individuals may be used for mapping. Such methodologies are well known to those skilled in the art.

[0225] The nucleic acid probes may also be used for physical mapping (i.e., placement of sequences on physical maps; see Hoheisel et al. In: Non-mammalian Genomic Analysis: A Practical Guide, Academic press 1996, pp. 319-346, and references cited therein).

[0226] In another embodiment, the nucleic acid probes may be used in direct fluorescence in situ hybridisation (FISH) mapping (Trask (1991) Trends Genet. 7:149-154). Although current methods of FISH mapping favour use of large clones (several kb to several hundred kb; see Lean et al. (1995) Genome Res. 5:13-20), improvements in sensitivity may allow performance of FISH mapping using shorter probes.

[0227] A variety of nucleic acid amplification-based methods for genetic and physical mapping may be carried out using the nucleic acids. Examples include allele-specific amplification (Kazazian (1989) J. Lab. Clin. Med. 11:95-96), polymorphism of PCR-amplified fragments (CAPS; Sheffield et al. (1993) Genomics 16:325-332), allele-specific ligation (Landegren et al. (1988) Science 241:1077-1080), nucleotide extension reactions (Sokolov (1990) Nucleic Acid Res. 18:3671), Radiation Hybrid Mapping (Walter et al. (1997) Nat. Genet. 7:22-28) and Happy Mapping (Dear and Cook (1989) Nucleic Acid Res. 17:6795-6807). For these methods, the sequence of a nucleic acid is used to design and produce primer pairs for use in the amplification reaction or in primer extension reactions. The design of such primers is well known to those skilled in the art. In methods employing PCR-based genetic mapping, it may be necessary to identify DNA sequence differences between the parents of the mapping cross in the region corresponding to the instant nucleic acid sequence. This, however, is generally not necessary for mapping methods.

[0228] The methods according to the present invention result in plants having enhanced yield-related traits, as described hereinbefore. These traits may also be combined with other economically advantageous traits, such as further yield-enhancing traits, tolerance to other abiotic and biotic stresses, traits modifying various architectural features and/or biochemical and/or physiological features.

### II. JMJC (JUMONJI-C) Polypeptide

[0229] Surprisingly, it has now been found that modulating expression in a plant of a nucleic acid encoding a JMJC polypeptide gives plants having enhanced yield-related traits relative to control plants. According to a first embodiment, the present invention provides a method for enhancing yield-related traits in plants relative to control plants, comprising modulating expression in a plant of a nucleic acid encoding a JMJC polypeptide.

[0230] A preferred method for modulating (preferably, increasing) expression of a nucleic acid encoding a JMJC polypeptide is by introducing and expressing in a plant a nucleic acid encoding a JMJC polypeptide.

[0231] Any reference hereinafter to a “protein useful in the methods of the invention” is taken to mean a JMJC polypeptide as defined herein. Any reference hereinafter to a “nucleic acid useful in the methods of the invention” is taken to mean a nucleic acid capable of encoding such a JMJC polypeptide. The nucleic acid to be introduced into a plant (and therefore useful in performing the methods of the invention) is any nucleic acid encoding the type of protein, which will now be described, hereafter also named “JMJC nucleic acid” or “JMJC gene”.

[0232] A JMJC polypeptide as defined herein refers to a polypeptide comprising at least a JmjC domain.

[0233] The JmjC domain is a conserved sequence found in proteins of prokaryotic and eukaryotic organisms. JmjC domains are in average 111 amino acids long. Typically the length of a JmjC domain can range between 25 to 200 amino acids though shorter and longer versions maybe possible. JmjC domains are predicted to be metalloenzymes that adopt the cupin fold, and are candidates for enzymes that regulate chromatin remodelling (Clissold et al. Trends Biochem Sci. 2001 January; 26(1):7-9).

[0234] JMJC polypeptides can be found in specialized databases such as Pfam, (Finn et al. Nucleic Acids Research (2006) Database Issue 34:D247-D251). Pfam compiles a large collection of multiple sequence alignments and hidden Markov models (HMM) covering many common protein domains and families and is available through the Sanger Institute in the United Kingdom.

[0235] The gathering cutoff threshold of the JmjC domain in the Pfam HMM_fs model is of 16.0 and of −8.0 in the HMM_ls model. Trusted matches as considered in the Pfam database are those scoring higher than the gathering cut-off threshold. However potential matches, comprising true JmjC domains, may still fall under the gathering cut-off. Preferably a JMJC polypeptide is a protein having one or more domains in their sequence that exceed the gathering cutoff of the Pfam protein domain family PF02373, jumonji, jmjC,

[0236] Alternatively, a JmjC domain in a polypeptide may be identified by performing a sequence comparison with known polypeptides comprising a JmjC domain and establishing the similarity in the region of the JmjC domain. The sequences may be aligned using any of the methods well known in the art such as Blast algorithms and the probability for the alignment to occur with a given sequence is taken as basis for identifying similar polypeptides. A parameter that is typically used to represent such probability in pair wise comparisons is called e-value. The e-value describes how often a given score is expected to occur random; The e-value cut-off may be as high as 1.0. Typically alignments with high likelihood to occur have an e-value lower than 0.1, 0.01, 0.001, 1.e-05, 1.e-10, 1.e-15, 1.e-20, 1.e-25, 1.e-50, 1.e-75, 1.e-100 and 1.e-200. Preferably JMJC polypeptides of the invention comprise a sequence having in increasing order of preference an e-value lower than 0.1, 0.01, 0.001, 1.e-05, 1.e-10, 1.e-15, 1.e-20, 1.e-25, 1.e-50, 1.e-75, 1.e-100 and 1.e-200 for an alignment with JmjC domain found in a known JMJC polypeptide.

[0237] Examples of JMJC polypeptides are given in Table B1. The amino acid coordinates of the JmjC domains as present in representative JMJC polypeptides of dicotyledonous origin is given in Table B4. An example of JmjC domain is given in SEQ ID NO: 78.

[0238] The sequence identity between JmjC domains is typically low, in average 23% and maybe as low as 10%. Preferred JMJC polypeptides of the inventions are those having in increasing order of preference at least 50%, 55%, 60%, 65%, 70%, 75%, 80%, 85%, 90%, 95%, or more sequence identity to SEQ ID NO: 78 or to any of the JmjC domains comprised in the JMJC polypeptides represented by SEQ ID NO: 84; SEQ ID NO: 86; SEQ ID NO: 96; SEQ ID NO: 98; SEQ ID NO: 104; SEQ ID NO: 108; SEQ ID NO: 110; SEQ ID NO: 112; SEQ ID NO: 114; SEQ ID NO: 116; SEQ ID NO: 118; SEQ ID NO: 120; SEQ ID NO: 122; SEQ ID NO: 124; SEQ ID NO: 128; SEQ ID NO: 130; SEQ ID NO: 132; and SEQ ID NO: 134, whose amino acid coordinates are given in Table B4.

[0239] In addition to the JmjC domain, JMJC polypeptides may optionally comprise other highly conserved sequence motifs, such as those represented in SEQ ID NO: 79, SEQ ID NO: 80, SEQ ID NO: 81, which are found in SEQ ID NO: 74. Further, the polypeptides of the invention may comprise a conserved sequence found in oxygenases which has been involved in the coordination of iron cations, herein represented by HXD(V) or EXnH (SEQ ID NO: 82), wherein “X” represents any amino acid and “n” represents the number of X-residues ranging between 1-5, both included.

[0240] A preferred JMJC polypeptide of the invention refers to any polypeptide comprising a JmjC domain and optionally having in increasing order of preference at least 50%, 55%, 60%, 65%, 70%, 75%, 80%, 85%, 90%, 95% or more sequence identity to any one or more of the conserved sequence motifs as represented by SEQ ID NO: 79, SEQ ID NO: 80, SEQ ID NO: 81 and SEQ ID NO: 82.

[0241] Evidence of domain swapping in the JUMONJI family of proteins has been reported, (Balciunas and Ronne. Trends Biochem Sci 2000; 25:274-276). Accordingly, in addition to the JmjC domain, JMJC polypeptides typically contain one or more different kinds of other known conserved domains. Relevant to the polypeptides of the invention are JMJC polypeptides that in addition to the JmjC domain comprise other conserved domains, which are presumably involved in DNA binding and transcription activities such as zinc fingers and/or in protein interaction and protein turnover, such as F-box and zinc finger-RING-type domains.

[0242] Therefore the JMJC polypeptide useful in the methods of the invention comprises a JmjC domain and optionally one or more of the following conserved domains: JmJN (pfam accession number PF02375); C5HC2 zinc finger (pfam accession number: PF02928), FY-rich domain, N-terminal (InterPro accession number: IPR003888) and FY-rich domain, C-terminal (InterPro accession number: IPR003889), a Zinc finger FYVE/PHD-Zn type (InterPro accession number: IPR011011), a Zinc finger C₂H₂ type (pfam accession number: PF00096), a Zinc finger —RING type (zf-C3HC4) (pfam accession number PF00097) and an F-box domain (pfam accession number: PF00646).

[0243] Preferably the JMJC polypeptide of the invention comprises a sequence having in increasing order of preference of 50%, 60%, 70%, 75%, 60%, 85%, 90%, 92%, 94%, 96%, 98% or more sequence identity to SEQ ID NO: 74, SEQ ID NO: 86, SEQ ID NO: 94, SEQ ID NO: 104, SEQ ID NO: 122, SEQ ID NO: 134, SEQ ID NO: 136, SEQ ID NO: 140, SEQ ID NO: 142 and SEQ ID NO: 148.

[0244] Preferably, the polypeptide sequence which when used in the construction of a phylogenetic tree, such as the one depicted in FIG. 8, clusters with the group of JMJC polypeptides (Takeuchi et al. Dev Dyn. 2006 235(9): 2449-59) comprising the amino acid sequence represented by SEQ ID NO: 74 rather than with any other group.

[0245] The term “domain” and “motif” is defined in the “definitions” section herein. Specialist databases exist for the identification of domains, for example, SMART (Schultz et al. (1998) Proc. Natl. Acad. Sci. USA 95, 5857-5864; Letunic et al. (2002) Nucleic Acids Res 30, 242-244, InterPro (Mulder et al., (2003) Nucl. Acids. Res. 31, 315-318, Prosite (Bucher and Bairoch (1994), A generalized profile syntax for biomolecular sequences motifs and its function in automatic sequence interpretation. (In) ISMB-94; Proceedings 2nd International Conference on Intelligent Systems for Molecular Biology. Altman R., Brutlag D., Karp P., Lathrop R., Searls D., Eds., pp 53-61, AAAI Press, Menlo Park; Hulo et al., Nucl. Acids. Res. 32:D134-D137, (2004), or Pfam (Bateman et al., Nucleic Acids Research 30(1): 276-280 (2002). A set of tools for in silica analysis of protein sequences is available on the ExPASy proteomics server (Swiss Institute of Bioinformatics (Gasteiger et al., ExPASy: the proteomics server for in-depth protein knowledge and analysis, Nucleic Acids Res. 31:3784-3788 (2003)). Domains may also be identified using routine techniques, such as by sequence alignment.

[0246] Methods for the alignment of sequences for comparison are well known in the art, such methods include GAP, BESTFIT, BLAST, FASTA and TFASTA. GAP uses the algorithm of Needleman and Wunsch ((1970) J Mol Biol 48: 443-453) to find the global (i.e. spanning the complete sequences) alignment of two sequences that maximizes the number of matches and minimizes the number of gaps. The BLAST algorithm (Altschul et al. (1990) J Mal Biol 215: 403-10) calculates percent sequence identity and performs a statistical analysis of the similarity between the two sequences. The software for performing BLAST analysis is publicly available through the National Centre for Biotechnology Information (NCBI). Homologues may readily be identified using, for example, the ClustalW multiple sequence alignment algorithm (version 1.83), with the default pairwise alignment parameters, and a scoring method in percentage. Global percentages of similarity and identity may also be determined using one of the methods available in the MatGAT software package (Campanella et al., BMC Bioinformatics. 2003 Jul. 10; 4:29. MatGAT: an application that generates similarity/identity matrices using protein or DNA sequences.). Minor manual editing may be performed to optimise alignment between conserved motifs, as would be apparent to a person skilled in the art. Furthermore, instead of using full-length sequences for the identification of homologues, specific domains may also be used. The sequence identity values may be determined over the entire nucleic acid or amino acid sequence or over selected domains or conserved motif(s), using the programs mentioned above using the default parameters.

[0247] Furthermore, JMJC polypeptides may typically have protein hydroxylases activity, in particular peptide-aspartate beta-dioxygenase (PABD) activity (EC 1.14.11.16). The reaction catalyzed is: peptide L.-aspartate+2-oxoglutarate+O(2)<=>peptide 3-hydroxy-L-aspartate+succinate+CO(2). The cofactors in the reaction are iron and 2-Oxogluatarate. Tools and techniques for measuring PABD activity are well known in the art (see for example Lavaissiere et al. J Clin Invest. 1996; 98(6):1313-23; Linke et al. J Biol. Chem. 2004; 279(14):14391-7; Lee, et al. J. Biol. Chem. 278:7558-7563; 2003; Lando et al. Genes Dev. 16:1466-1471; 2002). Iron (11)12-oxoglutarate (2-OG)-dependent oxygenases catalyse oxidative reactions in various metabolic reactions. Recently it has been proposed that JMJC polypeptides can also have histone demethylase activity (Trewick et al. 2005).

[0248] The present invention is illustrated by transforming plants with the nucleic acid sequence represented by SEQ ID NO: 73, encoding the polypeptide sequence of SEQ ID NO: 74. However, performance of the invention is not restricted to these sequences; the methods of the invention may advantageously be performed using any JMJC-encoding nucleic acid or JMJC polypeptide as defined herein.

[0249] Examples of nucleic acids encoding JMJC polypeptides are given in Table B1 of Example 12 herein. Such nucleic acids are useful in performing the methods of the invention. The amino acid sequences given in Table B1 of Example 12 are example sequences of orthologues and paralogues of the JMJC polypeptide represented by SEQ ID NO: 74, the terms “orthologues” and “paralogues” being as defined herein. Further orthologues and paralogues may readily be identified by performing a so-called reciprocal blast search. Typically, this involves a first BLAST involving BLASTing a query sequence (for example using any of the sequences listed in Table 81 of Example 12) against any sequence database, such as the publicly available NCBI database. BLASTN or TBLASTX (using standard default values) are generally used when starting from a nucleotide sequence, and BLASTP or TBLASTN (using standard default values) when starting from a protein sequence. The BLAST results may optionally be filtered. The full-length sequences of either the filtered results or non-filtered results are then BLASTed back (second BLAST) against sequences from the organism from which the query sequence is derived (where the query sequence is SEQ ID NO: 73 or SEQ ID NO: 74, the second BLAST would therefore be against Arabidopsis sequences). The results of the first and second BLASTs are then compared. A paralogue is identified if a high-ranking hit from the first blast is from the same species as from which the query sequence is derived, a BLAST back then ideally results in the query sequence amongst the highest hits; an orthologue is identified if a high-ranking hit in the first BLAST is not from the same species as from which the query sequence is derived, and preferably results upon BLAST back in the query sequence being among the highest hits.

[0250] High-ranking hits are those having a low E-value. The lower the E-value, the more significant the score (or in other words the lower the chance that the hit was found by chance). Computation of the E-value is well known in the art. In addition to E-values, comparisons are also scored by percentage identity. Percentage identity refers to the number of identical nucleotides (or amino acids) between the two compared nucleic acid (or polypeptide) sequences over a particular length. In the case of large families, ClustalW may be used, followed by a neighbour joining tree, to help visualize clustering of related genes and to identify orthologues and paralogues.

[0251] Nucleic acid variants may also be useful in practising the methods of the invention. Examples of such variants include nucleic acids encoding homologues and derivatives of any one of the amino acid sequences given in Table B1 of Example 12, the terms “homologue” and “derivative” being as defined herein. Also useful in the methods of the invention are nucleic acids encoding homologues and derivatives of orthologues or paralogues of any one of the amino acid sequences given in Table B1 of Example 12. Homologues and derivatives useful in the methods of the present invention have substantially the same biological and functional activity as the unmodified protein from which they are derived.

[0252] Further nucleic acid variants useful in practising the methods of the invention include portions of nucleic acids encoding JMJC polypeptides, nucleic acids hybridising to nucleic acids encoding JMJC polypeptides, splice variants of nucleic acids encoding JMJC polypeptides, allelic variants of nucleic acids encoding JMJC polypeptides and variants of nucleic acids encoding JMJC polypeptides obtained by gene shuffling. The terms hybridising sequence, splice variant, allelic variant and gene shuffling are as described herein.

[0253] Nucleic acids encoding JMJC polypeptides need not be full-length nucleic acids, since performance of the methods of the invention does not rely on the use of full-length nucleic acid sequences. According to the present invention, there is provided a method for enhancing yield-related traits in plants, comprising introducing and expressing in a plant a portion of any one of the nucleic acid sequences given in Table B1 of Example 12, or a portion of a nucleic acid encoding an orthologue, paralogue or homologue of any of the amino acid sequences given in Table B1 of Example 12.

[0254] A portion of a nucleic acid may be prepared, for example, by making one or more deletions to the nucleic acid. The portions may be used in isolated form or they may be fused to other coding (or non-coding) sequences in order to, for example, produce a protein that combines several activities. When fused to other coding sequences, the resultant polypeptide produced upon translation may be bigger than that predicted for the protein portion.

[0255] Portions useful in the methods of the invention, encode a JMJC polypeptide as defined herein, and have substantially the same biological activity as the amino acid sequences given in Table B1 of Example 12. Preferably, the portion is a portion of any one of the nucleic acids given in Table B1 of Example 12, or is a portion of a nucleic acid encoding an orthologue or paralogue of any one of the amino acid sequences given in Table B1 of Example 12. Preferably the portion is at least 100, 200, 500, 550, 600, 650, 700, 750, 800, 850, 900, 950, 1000, 1500, 2000, 2500, 3000, 3500, 4000, 4500, 5000 consecutive nucleotides in length, the consecutive nucleotides being of any one of the nucleic acid sequences given in Table B1 of Example 12, or of a nucleic acid encoding an orthologue or paralogue of any one of the amino acid sequences given in Table B1 of Example 12. Most preferably the portion is a portion of the nucleic acid of SEQ ID NO: 73. Preferably, the portion encodes an amino acid sequence which when used in the construction of a phylogenetic tree, such as the one depicted in FIG. 8, clusters with the group of JMJC polypeptides (Takeuchi et al. rev Dyn. 2006 235(9):2449-59) comprising the amino acid sequence represented by SEQ ID NO: 74 rather than with any other group.

[0256] Another nucleic acid variant useful in the methods of the invention is a nucleic acid capable of hybridising, under reduced stringency conditions, preferably under stringent conditions, with a nucleic acid encoding a JMJC polypeptide as defined herein, or with a portion as defined herein.

[0257] According to the present invention, there is provided a method for enhancing yield-related traits in plants, comprising introducing and expressing in a plant a nucleic acid capable of hybridizing to any one of the nucleic acids given in Table B1 of Example 12, or comprising introducing and expressing in a plant a nucleic acid capable of hybridising to a nucleic acid encoding an orthologue, paralogue or homologue of any of the nucleic acid sequences given in Table B1 of Example 12.

[0258] Hybridising sequences useful in the methods of the invention encode a JMJC polypeptide as defined herein, and have substantially the same biological activity as the amino acid sequences given in Table B1 of Example 12. Preferably, the hybridising sequence is capable of hybridising to any one of the nucleic acids given in Table B1 of Example 12, or to a portion of any of these sequences, a portion being as defined above; or wherein the hybridising sequence is capable of hybridising to a nucleic acid encoding an orthologue or paralogue of any one of the amino acid sequences given in Table B1 of Example 12. Most preferably, the hybridising sequence is capable of hybridising to a nucleic acid as represented by SEQ ID NO: 73 or to a portion thereof.

[0259] Preferably, the hybridising sequence encodes an amino acid sequence which when used in the construction of a phylogenetic tree, such as the one depicted in FIG. 8, clusters with the group of JMJC polypeptides (Takeuchi et al. Dev Dyn. 2006 235(9):2449-59) comprising the amino acid sequence represented by SEQ ID NO: 74 rather than with any other group.

[0260] Another nucleic acid variant useful in the methods of the invention is a splice variant encoding a JMJC polypeptide as defined hereinabove, a splice variant being as defined herein.

[0261] According to the present invention, there is provided a method for enhancing yield-related traits in plants, comprising introducing and expressing in a plant a splice variant of any one of the nucleic acid sequences given in Table B1 of Example 12, or a splice variant of a nucleic acid encoding an orthologue, paralogue or homologue of any of the amino acid sequences given in Table B1 of Example 12. An example of a spliced variant of the gene encoding SEQ ID NO: 74 is represented by SEQ ID NO: 73 and SEQ ID NO: 83 (encoding SEQ ID NO: 84).

[0262] Preferred splice variants are splice variants of a nucleic acid represented by SEQ ID NO: 73, or a splice variant of a nucleic acid encoding an orthologue or paralogue of SEQ ID NO: 74. Preferably, the amino acid sequence encoded by the splice variant, when used in the construction of a phylogenetic tree, such as the one depicted in FIG. 8, clusters with the group of JMJC polypeptides (Takeuchi et al. Dev Dyn. 2006 235(9):2449-59) comprising the amino acid sequence represented by SEQ ID NO: 74 any other group.

[0263] Another nucleic acid variant useful in performing the methods of the invention is an allelic variant of a nucleic acid encoding a JMJC polypeptide as defined hereinabove, an allelic variant being as defined herein.

[0264] According to the present invention, there is provided a method for enhancing yield-related traits in plants, comprising introducing and expressing in a plant an allelic variant of any one of the nucleic acids given in Table B1 of Example 12, or comprising introducing and expressing in a plant an allelic variant of a nucleic acid encoding an orthologue, paralogue or homologue of any of the amino acid sequences given in Table B1 of Example 12.

[0265] The allelic variants useful in the methods of the present invention have substantially the same biological activity as the JMJC polypeptide of SEQ ID NO: 74 and any of the amino acids depicted in Table B1 of Example 12. Allelic variants exist in nature, and encompassed within the methods of the present invention is the use of these natural alleles. Preferably, the allelic variant is an allelic variant of SEQ ID NO: 73 or an allelic variant of a nucleic acid encoding an orthologue or paralogue of SEQ ID NO: 74. Preferably, the amino acid sequence encoded by the allelic variant, when used in the construction of a phylogenetic tree, such as the one depicted in FIG. 8, clusters with the JMJC polypeptides (Takeuchi et al. Dev Dyn. 2006 235(9):2449-59) comprising the amino acid sequence represented by SEQ ID NO: 74 rather than with any other group.

[0266] Gene shuffling or directed evolution may also be used to generate variants of nucleic acids encoding JMJC polypeptides as defined above; the term “gene shuffling” being as defined herein.

[0267] According to the present invention, there is provided a method for enhancing yield-related traits in plants, comprising introducing and expressing in a plant a variant of any one of the nucleic acid sequences given in Table B1 of Example 12, or comprising introducing and expressing in a plant a variant of a nucleic acid encoding an orthologue, paralogue or homologue of any of the amino acid sequences given in Table B1 of Example 12, which variant nucleic acid is obtained by gene shuffling.

[0268] Advantageously, the present invention provides hitherto unknown JMJ nucleic acid and polypeptide sequences.

[0269] According to a further embodiment of the present invention, there is provided an isolated nucleic acid molecule comprising:
[0270] (i) a nucleic acid represented by SEQ ID NO: 169;
[0271] (ii) a nucleic acid or fragment thereof that is complementary to SEQ ID NO: 169;
[0272] (iii) a nucleic acid encoding an JMJC polypeptide having, in increasing order of preference, at least 70%, 75%, 80%, 85%, 90%, 95%, 96%, 97%, 98%, 99% or more sequence identity to the amino acid sequence given in SEQ ID NO: 170;
[0273] (iv) a nucleic acid capable of hybridizing under stringent conditions to any one of the nucleic acids given in (i), (ii) or (iii) above.

[0274] According to a further embodiment of the present invention, there is therefore provided an isolated polypeptide comprising:
[0275] (i) an amino acid sequence having, in increasing order of preference, at least 70%, 75%, 80%, 85%, 90%, 95%, 96%, 97%, 98%, 99% or 100% or more sequence identity to the amino acid sequence given in SEQ ID NO: 170;
[0276] (ii) derivatives of any of the amino acid sequences given in (i).

[0277] Preferably, the amino acid sequence encoded by the variant nucleic acid obtained by gene shuffling, when used in the construction of a phylogenetic tree such as the one depicted in FIG. 8, clusters with the group of JMJC polypeptides (Takeuchi et al. Dev Dyn. 2006 235(9):2449-59) comprising the amino acid sequence represented by SEQ ID NO: 74 rather than with any other group.

[0278] Furthermore, nucleic acid variants may also be obtained by site-directed mutagenesis. Several methods are available to achieve site-directed mutagenesis, the most common being PCR based methods (Current Protocols in Molecular Biology. Wiley Eds.).

[0279] Nucleic acids encoding JMJC polypeptides may be derived from any natural or artificial source. The nucleic acid may be modified from its native form in composition and/or genomic environment through deliberate human manipulation. Preferably the JMJC polypeptide-encoding nucleic acid is from a plant, further preferably from a dicotyledonous plant, more preferably from the family Brassicaceae, most preferably the nucleic acid is from Arabidopsis thaliana.

[0280] Performance of the methods of the invention gives plants having enhanced yield-related traits. In particular performance of the methods of the invention gives plants having increased yield, especially increased seed yield relative to control plants. The terms “yield” and “seed yield” are described in more detail in the “definitions” section herein.

[0281] Reference herein to enhanced yield-related traits is taken to mean an increase in biomass (weight) of one or more parts of a plant, which may include aboveground (harvestable) parts and/or (harvestable) parts below ground. In particular, such harvestable parts are seeds, and performance of the methods of the invention results in plants having increased yield relative to the yield of control plants.

[0282] Taking corn as an example, a yield increase may be manifested as one or more of the following: increase in the number of plants established per hectare or acre, an increase in the number of ears per plant, an increase in the number of rows, number of kernels per row, kernel weight, thousand kernel weight, ear length/diameter, increase in the seed filling rate (which is the number of filled seeds divided by the total number of seeds and multiplied by 100), among others. Taking rice as an example, a yield increase may manifest itself as an increase in one or more of the following: number of plants per hectare or acre, number of panicles per plant, number of spikelets per panicle, number of flowers (florets) per panicle (which is expressed as a ratio of the number of filled seeds over the number of primary panicles), increase in the seed filling rate (which is the number of filled seeds divided by the total number of seeds and multiplied by 100), increase in thousand kernel weight, among others.

[0283] The present invention provides a method for increasing yield, especially seed yield of plants, relative to control plants, which method comprises modulating expression, preferably increasing expression, in a plant of a nucleic acid encoding a JMJC polypeptide as defined herein.

[0284] Since the transgenic plants according to the present invention have increased yield, it is likely that these plants exhibit an increased growth rate (during at least part of their life cycle), relative to the growth rate of control plants at a corresponding stage in their life cycle.

[0285] The increased growth rate may be specific to one or more parts of a plant (including seeds), or may be throughout substantially the whole plant. Plants having an increased growth rate may have a shorter life cycle. The life cycle of a plant may be taken to mean the time needed to grow from a dry mature seed up to the stage where the plant has produced dry mature seeds, similar to the starting material. This life cycle may be influenced by factors such as early vigour, growth rate, greenness index, flowering time and speed of seed maturation. The increase in growth rate may take place at one or more stages in the life cycle of a plant or during substantially the whole plant life cycle. Increased growth rate during the early stages in the life cycle of a plant may reflect enhanced vigour. The increase in growth rate may alter the harvest cycle of a plant allowing plants to be sown later and/or harvested sooner than would otherwise be possible (a similar effect may be obtained with earlier flowering time). If the growth rate is sufficiently increased, it may allow for the further sowing of seeds of the same plant species (for example sowing and harvesting of rice plants followed by sowing and harvesting of further rice plants all within one conventional growing period). Similarly, if the growth rate is sufficiently increased, it may allow for the further sowing of seeds of different plants species (for example the sowing and harvesting of corn plants followed by, for example, the sowing and optional harvesting of soybean, potato or any other suitable plant). Harvesting additional times from the same rootstock in the case of some crop plants may also be possible. Altering the harvest cycle of a plant may lead to an increase in annual biomass production per acre (due to an increase in the number of times (say in a year) that any particular plant may be grown and harvested). An increase in growth rate may also allow for the cultivation of transgenic plants in a wider geographical area than their wild-type counterparts, since the territorial limitations for growing a crop are often determined by adverse environmental conditions either at the time of planting (early season) or at the time of harvesting (late season). Such adverse conditions may be avoided if the harvest cycle is shortened. The growth rate may be determined by deriving various parameters from growth curves, such parameters may be: T-Mid (the time taken for plants to reach 50% of their maximal size) and T-90 (time taken for plants to reach 90% of their maximal size), amongst others.

[0286] According to a preferred feature of the present invention, performance of the methods of the invention gives plants having an increased growth rate relative to control plants. Therefore, according to the present invention, there is provided a method for increasing the growth rate of plants, which method comprises modulating expression, preferably increasing expression, in a plant of a nucleic acid encoding a JMJC polypeptide as defined herein.

[0287] An increase in yield and/or growth rate occurs whether the plant is under non-stress conditions or whether the plant is exposed to various stresses compared to control plants. Plants typically respond to exposure to stress by growing more slowly. In conditions of severe stress, the plant may even stop growing altogether. Mild stress on the other hand is defined herein as being any stress to which a plant is exposed which does not result in the plant ceasing to grow altogether without the capacity to resume growth. Mild stress in the sense of the invention leads to a reduction in the growth of the stressed plants of less than 40%, 35% or 30%, preferably less than 25%, 20% or 15%, more preferably less than 14%, 13%, 12%, 11% or 10% or less in comparison to the control plant under non-stress conditions. Due to advances in agricultural practices (irrigation, fertilization, pesticide treatments) severe stresses are not often encountered in cultivated crop plants. As a consequence, the compromised growth induced by mild stress is often an undesirable feature for agriculture. Mild stresses are the everyday biotic and/or abiotic (environmental) stresses to which a plant is exposed. Abiotic stresses may be due to drought or excess water, anaerobic stress, salt stress, chemical toxicity, oxidative stress and hot, cold or freezing temperatures. The abiotic stress may be an osmotic stress caused by a water stress (particularly due to drought), salt stress, oxidative stress or an ionic stress. Biotic stresses are typically those stresses caused by pathogens, such as bacteria, viruses, fungi and insects.

[0288] In particular, the methods of the present invention may be performed under non-stress conditions or under conditions of mild drought to give plants having increased yield relative to control plants. As reported in Wang et al. (Planta (2003) 218: 1-14), abiotic stress leads to a series of morphological, physiological, biochemical and molecular changes that adversely affect plant growth and productivity. Drought, salinity, extreme temperatures and oxidative stress are known to be interconnected and may induce growth and cellular damage through similar mechanisms. Rabbani et al. (Plant Physiol (2003) 133: 1755-1767) describes a particularly high degree of “cross talk” between drought stress and high-salinity stress. For example, drought and/or salinisation are manifested primarily as osmotic stress, resulting in the disruption of homeostasis and ion distribution in the cell. Oxidative stress, which frequently accompanies high or low temperature, salinity or drought stress, may cause denaturing of functional and structural proteins. As a consequence, these diverse environmental stresses often activate similar cell signalling pathways and cellular responses, such as the production of stress proteins, up-regulation of anti-oxidants, accumulation of compatible solutes and growth arrest. The term “non-stress” conditions as used herein are those environmental conditions that allow optimal growth of plants. Persons skilled in the art are aware of normal soil conditions and climatic conditions for a given location. Plants with optimal growth conditions, (grown under non-stress conditions) typically yield in increasing order of preference at least 90%, 87%, 85%, 83%, 80%, 77% or 75% of the average production of such plant in a given environment. Average production may be calculated on harvest and/or season basis. Persons skilled in the art are aware of average yield productions of a crop.

[0289] Performance of the methods of the invention gives plants grown under non-stress conditions or under mild drought conditions increased yield relative to control plants grown under comparable conditions. Therefore, according to the present invention, there is provided a method for increasing yield in plants grown under non-stress conditions or under mild drought conditions, which method comprises increasing expression in a plant of a nucleic acid encoding a JMJC polypeptide.

[0290] Performance of the methods of the invention gives plants grown under conditions of nutrient deficiency, particularly under conditions of nitrogen deficiency, increased yield relative to control plants grown under comparable conditions. Therefore, according to the present invention, there is provided a method for increasing yield in plants grown under conditions of nutrient deficiency, which method comprises increasing expression in a plant of a nucleic acid encoding a JMJC polypeptide. Nutrient deficiency may result from a lack or excess of nutrients such as nitrogen, phosphates and other phosphorous-containing compounds, potassium, calcium, cadmium, magnesium, manganese, iron and boron, amongst others.

[0291] The present invention encompasses plants or parts thereof (including seeds) obtainable by the methods according to the present invention. The plants or parts thereof comprise a nucleic acid transgene encoding a JMJC polypeptide as defined above.

[0292] The invention also provides genetic constructs and vectors to facilitate introduction and/or expression in plants of nucleic acids encoding JMJC polypeptides. The gene constructs may be inserted into vectors, which may be commercially available, suitable for transforming into plants and suitable for expression of the gene of interest in the transformed cells. The invention also provides use of a gene construct as defined herein in the methods of the invention.

[0293] More specifically, the present invention provides a construct comprising:
[0294] (a) a nucleic acid encoding a JMJC polypeptide as defined above;
[0295] (b) one or more control sequences capable of driving expression of the nucleic acid sequence of (a); and optionally
[0296] (c) a transcription termination sequence.

[0297] Preferably, the nucleic acid encoding a JMJC polypeptide is as defined above. The term “control sequence” and “termination sequence” are as defined herein.

[0298] Plants are transformed with a vector comprising any of the nucleic acids described above. The skilled artisan is well aware of the genetic elements that must be present on the vector in order to successfully transform, select and propagate host cells containing the sequence of interest. The sequence of interest is operably linked to one or more control sequences (at least to a promoter).

[0299] Advantageously, any type of promoter, whether natural or synthetic, may be used to drive expression of the nucleic acid sequence. A constitutive promoter is particularly useful in the methods. See the “Definitions” section herein for definitions of the various promoter types.

[0300] It should be clear that the applicability of the present invention is not restricted to the JMJC polypeptide-encoding nucleic acid represented by SEQ ID NO: 73, nor is the applicability of the invention restricted to expression of a JMJC polypeptide-encoding nucleic acid when driven by a constitutive promoter.

[0301] The constitutive promoter is preferably a GOS2 promoter, preferably a GOS2 promoter from rice. Further preferably the constitutive promoter is represented by a nucleic acid sequence substantially similar to SEQ ID NO: 75, most preferably the constitutive promoter is as represented by SEQ ID NO: 75. See the “Definitions” section herein for further examples of constitutive promoters.

[0302] Optionally, one or more terminator sequences may be used in the construct introduced into a plant. Additional regulatory elements may include transcriptional as well as translational enhancers. Those skilled in the art will be aware of terminator and enhancer sequences that may be suitable for use in performing the invention. An intron sequence may also be added to the 5′ untranslated region (UTR) or in the coding sequence to increase the amount of the mature message that accumulates in the cytosol, as described in the definitions section. Other control sequences (besides promoter, enhancer, silencer, intron sequences, 3′UTR and/or 5′UTR regions) may be protein and/or RNA stabilizing elements. Such sequences would be known or may readily be obtained by a person skilled in the art.

[0303] The genetic constructs of the invention may further include an origin of replication sequence that is required for maintenance and/or replication in a specific cell type. One example is when a genetic construct is required to be maintained in a bacterial cell as an episomal genetic element (e.g. plasmid or cosmid molecule). Preferred origins of replication include, but are not limited to, the f1-ori and colE1.

[0304] For the detection of the successful transfer of the nucleic acid sequences as used in the methods of the invention and/or selection of transgenic plants comprising these nucleic acids, it is advantageous to use marker genes (or reporter genes). Therefore, the genetic construct may optionally comprise a selectable marker gene. Selectable markers are described in more detail in the “definitions” section herein.

[0305] It is known that upon stable or transient integration of nucleic acids into plant cells, only a minority of the cells takes up the foreign DNA and, if desired, integrates it into its genome, depending on the expression vector used and the transfection technique used. To identify and select these integrants, a gene coding for a selectable marker (such as the ones described above) is usually introduced into the host cells together with the gene of interest. These markers can for example be used in mutants in which these genes are not functional by, for example, deletion by conventional methods. Furthermore, nucleic acid molecules encoding a selectable marker can be introduced into a host cell on the same vector that comprises the sequence encoding the polypeptides of the invention or used in the methods of the invention, or else in a separate vector. Cells which have been stably transfected with the introduced nucleic acid can be identified for example by selection (for example, cells which have integrated the selectable marker survive whereas the other cells die). The marker genes may be removed or excised from the transgenic cell once they are no longer needed. Techniques for marker gene removal are known in the art, useful techniques are described above in the definitions section.

[0306] The invention also provides a method for the production of transgenic plants having enhanced yield-related traits relative to control plants, comprising introduction and expression in a plant of any nucleic acid encoding a JMJC polypeptide as defined hereinabove.

[0307] More specifically, the present invention provides a method for the production of transgenic plants having increased enhanced yield-related traits, particularly increased (seed) yield, which method comprises:
[0308] (i) introducing and expressing in a plant or plant cell a JMJC polypeptide-encoding nucleic acid; and
[0309] (ii) cultivating the plant cell under conditions promoting plant growth and development.

[0310] The nucleic acid of (i) may be any of the nucleic acids capable of encoding a JMJC polypeptide as defined herein.

[0311] The nucleic acid may be introduced directly into a plant cell or into the plant itself (including introduction into a tissue, organ or any other part of a plant). According to a preferred feature of the present invention, the nucleic acid is preferably introduced into a plant by transformation. The term “transformation” is described in more detail in the “definitions” section herein.

[0312] The genetically modified plant cells can be regenerated via all methods with which the skilled worker is familiar. Suitable methods can be found in the abovementioned publications by S. D. Kung and R. Wu, Potrykus or Höfgen and Willmitzer.

[0313] Generally after transformation, plant cells or cell groupings are selected for the presence of one or more markers which are encoded by plant-expressible genes co-transferred with the gene of interest, following which the transformed material is regenerated into a whole plant.

[0314] To select transformed plants, the plant material obtained in the transformation is, as a rule, subjected to selective conditions so that transformed plants can be distinguished from untransformed plants. For example, the seeds obtained in the above-described manner can be planted and, after an initial growing period, subjected to a suitable selection by spraying. A further possibility consists in growing the seeds, if appropriate after sterilization, on agar plates using a suitable selection agent so that only the transformed seeds can grow into plants. Alternatively, the transformed plants are screened for the presence of a selectable marker such as the ones described above.

[0315] Following DNA transfer and regeneration, putatively transformed plants may also be evaluated, for instance using Southern analysis, for the presence of the gene of interest, copy number and/or genomic organisation. Alternatively or additionally, expression levels of the newly introduced DNA may be monitored using Northern and/or Western analysis, both techniques being well known to persons having ordinary skill in the art.

[0316] The generated transformed plants may be propagated by a variety of means, such as by clonal propagation or classical breeding techniques. For example, a first generation (or T1) transformed plant may be selfed and homozygous second-generation (or T2) transformants selected, and the T2 plants may then further be propagated through classical breeding techniques. The generated transformed organisms may take a variety of forms. For example, they may be chimeras of transformed cells and non-transformed cells; clonal transformants (e.g., all cells transformed to contain the expression cassette); grafts of transformed and untransformed tissues (e.g., in plants, a transformed rootstock grafted to an untransformed scion).

[0317] The present invention clearly extends to any plant cell or plant produced by any of the methods described herein, and to all plant parts and propagules thereof. The present invention extends further to encompass the progeny of a primary transformed or transfected cell, tissue, organ or whole plant that has been produced by any of the aforementioned methods, the only requirement being that progeny exhibit the same genotypic and/or phenotypic characteristic(s) as those produced by the parent in the methods according to the invention.

[0318] The invention also includes host cells containing an isolated nucleic acid encoding a JMJC polypeptide as defined hereinabove. Preferred host cells according to the invention are plant cells. Host plants for the nucleic acids or the vector used in the method according to the invention, the expression cassette or construct or vector are, in principle, advantageously all plants, which are capable of synthesizing the polypeptides used in the inventive method.

[0319] The methods of the invention are advantageously applicable to any plant. Plants that are particularly useful in the methods of the invention include all plants which belong to the superfamily Viridiplantae, in particular monocotyledonous and dicotyledonous plants including fodder or forage legumes, ornamental plants, food crops, trees or shrubs. According to a preferred embodiment of the present invention, the plant is a crop plant. Examples of crop plants include soybean, sunflower, canola, alfalfa, rapeseed, cotton, tomato, potato and tobacco. Further preferably, the plant is a monocotyledonous plant Examples of monocotyledonous plants include sugarcane. More preferably the plant is a cereal. Examples of cereals include rice, maize, wheat, barley, millet, rye, triticale, sorghum and oats.

[0320] The invention also extends to harvestable parts of a plant such as, but not limited to seeds, leaves, fruits, flowers, stems, roots, rhizomes, tubers and bulbs. The invention furthermore relates to products derived, preferably directly derived, from a harvestable part of such a plant, such as dry pellets or powders, oil, fat and fatty acids, starch or proteins.

[0321] According to a preferred feature of the invention, the modulated expression is increased expression. Methods for increasing expression of nucleic acids or genes, or gene products, are well documented in the art and examples are provided in the definitions section.

[0322] As mentioned above, a preferred method for modulating (preferably, increasing) expression of a nucleic acid encoding a JMJC polypeptide is by introducing and expressing in a plant a nucleic acid encoding a JMJC polypeptide; however the effects of performing the method, i.e. enhancing yield-related traits may also be achieved using other well known techniques, including but not limited to T-DNA activation tagging, TILLING, homologous recombination. A description of these techniques is provided in the definitions section.

[0323] The present invention also encompasses use of nucleic acids encoding JMJC polypeptides as described herein and use of these JMJC polypeptides in enhancing any of the aforementioned yield-related traits in plants.

[0324] Nucleic acids encoding JMJC polypeptides described herein, or the JMJC polypeptides themselves, may find use in breeding programmes in which a DNA marker is identified which may be genetically linked to a JMJC polypeptide-encoding gene. The nucleic acids/genes, or the JMJC polypeptides themselves may be used to define a molecular marker. This DNA or protein marker may then be used in breeding programmes to select plants having enhanced yield-related traits as defined hereinabove in the methods of the invention.

[0325] Allelic variants of a JMJC polypeptide-encoding nucleic acid/gene may also find use in marker-assisted breeding programmes. Such breeding programmes sometimes require introduction of allelic variation by mutagenic treatment of the plants, using for example EMS mutagenesis; alternatively, the programme may start with a collection of allelic variants of so called “natural” origin caused unintentionally. Identification of allelic variants then takes place, for example, by PCR. This is followed by a step for selection of superior allelic variants of the sequence in question and which give increased yield. Selection is typically carried out by monitoring growth performance of plants containing different allelic variants of the sequence in question. Growth performance may be monitored in a greenhouse or in the field. Further optional steps include crossing plants in which the superior allelic variant was identified with another plant. This could be used, for example, to make a combination of interesting phenotypic features.

[0326] Nucleic acids encoding JMJC polypeptides may also be used as probes for genetically and physically mapping the genes that they are a part of, and as markers for traits linked to those genes. Such information may be useful in plant breeding in order to develop lines with desired phenotypes. Such use of JMJC polypeptide-encoding nucleic acids requires only a nucleic acid sequence of at least 15 nucleotides in length. The JMJC polypeptide-encoding nucleic acids may be used as restriction fragment length polymorphism (RFLP) markers. Southern blots (Sambrook J, Fritsch E F and Maniatis T (1989) Molecular Cloning, A Laboratory Manual) of restriction-digested plant genomic DNA may be probed with the JMJC-encoding nucleic acids. The resulting banding patterns may then be subjected to genetic analyses using computer programs such as MapMaker (Lander et al. (1987) Genomics 1: 174-181) in order to construct a genetic map. In addition, the nucleic acids may be used to probe Southern blots containing restriction endonuclease-treated genomic DNAs of a set of individuals representing parent and progeny of a defined genetic cross. Segregation of the DNA polymorphisms is noted and used to calculate the position of the JMJC polypeptide-encoding nucleic acid in the genetic map previously obtained using this population (Botstein et al. (1980) Am. J. Hum. Genet. 32:314-331).

[0327] The production and use of plant gene-derived probes for use in genetic mapping is described in Bernatzky and Tanksley (1986) Plant Mol. Biol. Reporter 4: 37-41. Numerous publications describe genetic mapping of specific cDNA clones using the methodology outlined above or variations thereof. For example, F2 intercross populations, backcross populations, randomly mated populations, near isogenic lines, and other sets of individuals may be used for mapping. Such methodologies are well known to those skilled in the art.

[0328] The nucleic acid probes may also be used for physical mapping (i.e., placement of sequences on physical maps; see Hoheisel et al. In: Non-mammalian Genomic Analysis: A Practical Guide, Academic press 1996, pp. 319-346, and references cited therein).

[0329] In another embodiment, the nucleic acid probes may be used in direct fluorescence in situ hybridisation (FISH) mapping (Trask (1991) Trends Genet. 7:149-154). Although current methods of FISH mapping favour use of large clones (several kb to several hundred kb; see Laan et al. (1995) Genome Res. 5:13-20), improvements in sensitivity may allow performance of FISH mapping using shorter probes.

[0330] A variety of nucleic acid amplification-based methods for genetic and physical mapping may be carried out using the nucleic acids. Examples include allele-specific amplification (Kazazian (1989) J. Lab. Clin. Med. 11:95-96), polymorphism of PCR-amplified fragments (CAPS; Sheffield et al. (1993) Genomics 16:325-332), allele-specific ligation (Landegren et al, (1988) Science 241:1077-1080), nucleotide extension reactions (Sokolov (1990) Nucleic Acid Res. 18:3671), Radiation Hybrid Mapping (Walter et al. (1997) Nat. Genet. 7:22-28) and Happy Mapping (Dear and Cook (1989) Nucleic Acid Res. 17:6795-6807). For these methods, the sequence of a nucleic acid is used to design and produce primer pairs for use in the amplification reaction or in primer extension reactions. The design of such primers is well known to those skilled in the art. In methods employing PCR-based genetic mapping, it may be necessary to identify DNA sequence differences between the parents of the mapping cross in the region corresponding to the instant nucleic acid sequence. This, however, is generally not necessary for mapping methods.

[0331] The methods according to the present invention result in plants having enhanced yield-related traits, as described hereinbefore. These traits may also be combined with other economically advantageous traits, such as further yield-enhancing traits, tolerance to other abiotic and biotic stresses, traits modifying various architectural features and/or biochemical and/or physiological features.

### III. CKI (Casein Kinase I) Polypeptide

[0332] Surprisingly, it has now been found that modulating expression in a plant of a nucleic acid encoding a CKI polypeptide gives plants having enhanced yield-related traits relative to control plants, According to a first embodiment, the present invention provides a method for enhancing yield-related traits in plants relative to control plants, comprising modulating expression in a plant of a nucleic acid encoding a CKI polypeptide.

[0333] A preferred method for modulating (preferably, increasing) expression of a nucleic acid encoding a CKI polypeptide is by introducing and expressing in a plant a nucleic acid encoding a CKI polypeptide.

[0334] Any reference hereinafter to a “protein useful in the methods of the invention” is taken to mean a CKI polypeptide as defined herein. Any reference hereinafter to a “nucleic acid useful in the methods of the invention” is taken to mean a nucleic acid capable of encoding such a CKI polypeptide. The nucleic acid to be introduced into a plant (and therefore useful in performing the methods of the invention) is any nucleic acid encoding the type of protein which will now be described, hereafter also named “CKI nucleic acid” or “CKI gene”.

[0335] A “CKI polypeptide” as defined herein refers the proteins represented by SEQ ID NO: 174 and to homologues (orthologues and paralogues) thereof. Preferably, the homologues of SEQ ID NO: 174 have a casein kinase domain.

[0336] The term “domain” and “motif” is defined in the “definitions” section herein. Specialist databases exist for the identification of domains, for example, SMART (Schultz et al. (1998) Proc. Natl. Acad. Sci. USA 95, 5857-5864; Letunic et al. (2002) Nucleic Acids Res 30, 242-244), InterPro (Mulder et al., (2003) Nucl. Acids. Res. 31, 315-318), Prosite (Bucher and Bairoch (1994), A generalized profile syntax for biomolecular sequences motifs and its function in automatic sequence interpretation. (In) ISMB-94; Proceedings 2nd International Conference on Intelligent Systems for Molecular Biology. Altman R., Brutlag D., Karp P., Lathrop R., Searls D., Eds., pp 53-61, AAAI Press, Menlo Park; Hula et al., Nucl. Acids. Res. 32:D134-D137, (2004)), or Pfam (Bateman et al., Nucleic Acids Research 30(1): 276-280 (2002)). A set of tools for in silico analysis of protein sequences is available on the ExPASy proteomics server (Swiss Institute of Bioinformatics (Gasteiger et al., ExPASy: the proteomics server for in-depth protein knowledge and analysis, Nucleic Acids Res. 31:3784-3788 (2003)). Domains or motifs may also be identified using routine techniques, such as by sequence alignment.

[0337] Methods for the alignment of sequences for comparison are well known in the art, such methods include GAP, BESTFIT, BLAST, FASTA and TFASTA. GAP uses the algorithm of Needleman and Wunsch ((1970) J Mol Biol 48: 443-453) to find the global (i.e. spanning the complete sequences) alignment of two sequences that maximizes the number of matches and minimizes the number of gaps. The BLAST algorithm (Altschul et al. (1990) J Mol Biol 215: 403-10) calculates percent sequence identity and performs a statistical analysis of the similarity between the two sequences. The software for performing BLAST analysis is publicly available through the National Centre for Biotechnology Information (NCBI). Homologues may readily be identified using, for example, the ClustalW multiple sequence alignment algorithm (version 1.83), with the default pairwise alignment parameters, and a scoring method in percentage. Global percentages of similarity and identity may also be determined using one of the methods available in the MatGAT software package (Campanella et al., BMC Bioinformatics. 2003 Jul. 10; 4:29. MatGAT: an application that generates similarity/identity matrices using protein or DNA sequences.). Minor manual editing may be performed to optimise alignment between conserved motifs, as would be apparent to a person skilled in the art. Furthermore, instead of using full-length sequences for the identification of homologues, specific domains may also be used. The sequence identity values may be determined over the entire nucleic acid or amino acid sequence or over selected domains or conserved motif(s), using the programs mentioned above using the default parameters.

[0338] Furthermore, CKI polypeptides, as far as SEQ ID NO: 174 and its homologues are concerned, the CKI proteins useful in the methods in the methods of the present invention typically have kinase activity. Methods for measuring kinase activity are known in the art.

[0339] The present invention is illustrated by transforming plants with the nucleic acid sequence represented by SEQ ID NO: 173, encoding the polypeptide sequence of SEQ ID NO: 174 respectively. However, performance of the invention is not restricted to these sequences; the methods of the invention may advantageously be performed using any CKI-encoding nucleic acid or CKI polypeptide as defined herein.

[0340] Examples of nucleic acids encoding CKI polypeptides may be found in databases known in the art. Such nucleic acids are useful in performing the methods of the invention. Orthologues and paralogues, the terms “orthologues” and “paralogues” being as defined herein, may readily be identified by performing a so-called reciprocal blast search. Typically, this involves a first BLAST involving BLASTing a query sequence (for example using SEQ ID NO: 174) against any sequence database, such as the publicly available NCBI database. BLASTN or TBLASTX (using standard default values) are generally used when starting from a nucleotide sequence, and BLASTP or TBLASTN (using standard default values) when starting from a protein sequence. The BLAST results may optionally be filtered. The full-length sequences of either the filtered results or non-filtered results are then BLASTed back (second BLAST) against sequences from the organism from which the query sequence is derived (where the query sequence is SEQ ID NO: 173 or SEQ ID NO: 174, the second BLAST would therefore be against Nicotiana tabacum sequences). The results of the first and second BLASTs are then compared. A paralogue is identified if a high-ranking hit from the first blast is from the same species as from which the query sequence is derived, a BLAST back then ideally results in the query sequence amongst the highest hits; an orthologue is identified if a high-ranking hit in the first BLAST is not from the same species as from which the query sequence is derived, and preferably results upon BLAST back in the query sequence being among the highest hits.

[0341] High-ranking hits are those having a low E-value. The lower the E-value, the more significant the score (or in other words the lower the chance that the hit was found by chance). Computation of the E-value is well known in the art. In addition to E-values, comparisons are also scored by percentage identity. Percentage identity refers to the number of identical nucleotides (or amino acids) between the two compared nucleic acid (or polypeptide) sequences over a particular length. In the case of large families, ClustalW may be used, followed by a neighbour joining tree, to help visualize clustering of related genes and to identify orthologues and paralogues.

[0342] Nucleic acid variants encoding homologues and derivatives of SEQ ID NO: 174 may also be useful in practising the methods of the invention, the terms “homologue” and “derivative” being as defined herein. Also useful in the methods of the invention are nucleic acids encoding homologues and derivatives of orthologues or paralogues of SEQ ID NO: 174. Homologues and derivatives useful in the methods of the present invention have substantially the same biological and functional activity as the unmodified protein from which they are derived.

[0343] Further nucleic acid variants useful in practising the methods of the invention include portions of nucleic acids encoding CKI polypeptides, nucleic acids hybridising to nucleic acids encoding CKI polypeptides, splice variants of nucleic acids encoding CKI polypeptides, allelic variants of nucleic acids encoding CKI polypeptides and variants of nucleic acids encoding CKI polypeptides obtained by gene shuffling. The terms hybridising sequence, splice variant, allelic variant and gene shuffling are as described herein.

[0344] Nucleic acids encoding CKI polypeptides need not be full-length nucleic acids, since performance of the methods of the invention does not rely on the use of full-length nucleic acid sequences. According to the present invention, there is provided a method for enhancing yield-related traits in plants, comprising introducing and expressing in a plant a portion of SEQ ID NO: 173, or a portion of a nucleic acid encoding an orthologue, paralogue or homologue of SEQ ID NO: 174.

[0345] A portion of a nucleic acid may be prepared, for example, by making one or more deletions to the nucleic acid. The portions may be used in isolated form or they may be fused to other coding (or non-coding) sequences in order to, for example, produce a protein that combines several activities. When fused to other coding sequences, the resultant polypeptide produced upon translation may be bigger than that predicted for the protein portion.

[0346] Portions useful in the methods of the invention, encode a CKI polypeptide as defined herein, and have substantially the same biological activity as the amino acid sequences given in SEQ ID NO: 174. Preferably, the portion is a portion of any one of the nucleic acids given in SEQ ID NO: 173, or is a portion of a nucleic acid encoding an orthologue or paralogue of any one of the amino acid sequences given in SEQ ID NO: 173. Preferably the portion is at least 500, 550, 600, 650, 700, 750, 800, 850, 900, 950, 1000, 1200, 1300, 1400 consecutive nucleotides in length, the consecutive nucleotides being of SEQ ID NO: 173, or of a nucleic acid encoding an orthologue or paralogue of SEQ ID NO: 174. Most preferably the portion is a portion of the nucleic acid of SEQ ID NO: 173.

[0347] Another nucleic acid variant useful in the methods of the invention is a nucleic acid capable of hybridising, under reduced stringency conditions, preferably under stringent conditions, with a nucleic acid encoding a CKI polypeptide as defined herein, or with a portion as defined herein.

[0348] According to the present invention, there is provided a method for enhancing yield-related traits in plants, comprising introducing and expressing in a plant a nucleic acid capable of hybridizing to SEQ ID NO: 173, or comprising introducing and expressing in a plant a nucleic acid capable of hybridising to a nucleic acid encoding an orthologue, paralogue or homologue of SEQ ID NO: 173.

[0349] Hybridising sequences useful in the methods of the invention encode a CKI polypeptide as defined herein, having substantially the same biological activity as the amino acid sequences given in SEQ ID NO: 174. Preferably, the hybridising sequence is capable of hybridising to SEQ ID NO: 173, or to a portion of any of these sequences, a portion being as defined above, or the hybridising sequence is capable of hybridising to a nucleic acid encoding an orthologue or paralogue of SEQ ID NO: 174.

[0350] Another nucleic acid variant useful in the methods of the invention is a splice variant encoding a CKI polypeptide as defined hereinabove, a splice variant being as defined herein.

[0351] According to the present invention, there is provided a method for enhancing yield-related traits in plants, comprising introducing and expressing in a plant a splice variant of SEQ ID NO: 173, or a splice variant of a nucleic acid encoding an orthologue, paralogue or homologue of SEQ ID NO: 174.

[0352] Another nucleic acid variant useful in performing the methods of the invention is an allelic variant of a nucleic acid encoding a CKI polypeptide as defined hereinabove, an allelic variant being as defined herein.

[0353] According to the present invention, there is provided a method for enhancing yield-related traits in plants, comprising introducing and expressing in a plant an allelic variant of SEQ ID NO: 173, or comprising introducing and expressing in a plant an allelic variant of a nucleic acid encoding an orthologue, paralogue or homologue of the amino acid sequences represented by SEQ ID NO: 174.

[0354] The allelic variants useful in the methods of the present invention have substantially the same biological activity as the CKI polypeptide of SEQ ID NO: 174. Allelic variants exist in nature, and encompassed within the methods of the present invention is the use of these natural alleles. Gene shuffling or directed evolution may also be used to generate variants of nucleic acids encoding CKI polypeptides as defined above; the term “gene shuffling” being as defined herein.

[0355] According to the present invention, there is provided a method for enhancing yield-related traits in plants, comprising introducing and expressing in a plant a variant of SEQ ID NO: 173, or comprising introducing and expressing in a plant a variant of a nucleic acid encoding an orthologue, paralogue or homologue of SEQ ID NO: 174, which variant nucleic acid is obtained by gene shuffling.

[0356] Furthermore, nucleic acid variants may also be obtained by site-directed mutagenesis. Several methods are available to achieve site-directed mutagenesis, the most common being PCR based methods (Current Protocols in Molecular Biology. Wiley Eds.).

[0357] Nucleic acids encoding CKI polypeptides may be derived from any natural or artificial source. The nucleic acid may be modified from its native form in composition and/or genomic environment through deliberate human manipulation. Preferably the CKI polypeptide-encoding nucleic acid is from a plant. In the case of SEQ ID NO: 173, the CKI polypeptide encoding nucleic acid is preferably from a dicotyledonous plant, more preferably from the family Solanaceae, most preferably the nucleic acid is from Nicotiana tabacum.

[0358] Performance of the methods of the invention gives plants having enhanced yield-related traits. In particular performance of the methods of the invention gives plants having increased early vigour and increased yield, especially increased biomass and increased seed yield relative to control plants. The terms “yield” and “seed yield” are described in more detail in the “definitions” section herein.

[0359] Reference herein to enhanced yield-related traits is taken to mean an increase in early vigour and/or in biomass (weight) of one or more parts of a plant, which may include aboveground (harvestable) parts and/or (harvestable) parts below ground. In particular, such harvestable parts are biomass and/or seeds, and performance of the methods of the invention results in plants having increased early vigour, biomass and/or seed yield relative to the early vigour, biomass or seed yield of control plants.

[0360] Taking corn as an example, a yield increase may be manifested as one or more of the following: increase in the number of plants established per hectare or acre, an increase in the number of ears per plant, an increase in the number of rows, number of kernels per row, kernel weight, thousand kernel weight, ear length/diameter, increase in the seed filling rate (which is the number of filled seeds divided by the total number of seeds and multiplied by 100), among others. Taking rice as an example, a yield increase may manifest itself as an increase in one or more of the following: number of plants per hectare or acre, number of panicles per plant, number of spikelets per panicle, number of flowers (florets) per panicle (which is expressed as a ratio of the number of filled seeds over the number of primary panicles), increase in the seed filling rate (which is the number of filled seeds divided by the total number of seeds and multiplied by 100), increase in thousand kernel weight, among others.

[0361] The present invention provides a method for increasing yield, especially biomass and/or seed yield of plants, relative to control plants, which method comprises modulating expression, preferably increasing expression, in a plant of a nucleic acid encoding a CKI polypeptide as defined herein.

[0362] Since the transgenic plants according to the present invention have increased yield, it is likely that these plants exhibit an increased growth rate (during at least part of their life cycle), relative to the growth rate of control plants at a corresponding stage in their life cycle.

[0363] The increased growth rate may be specific to one or more parts of a plant (including seeds), or may be throughout substantially the whole plant. Plants having an increased growth rate may have a shorter life cycle. The life cycle of a plant may be taken to mean the time needed to grow from a dry mature seed up to the stage where the plant has produced dry mature seeds, similar to the starting material. This life cycle may be influenced by factors such as early vigour, growth rate, greenness index, flowering time and speed of seed maturation. The increase in growth rate may take place at one or more stages in the life cycle of a plant or during substantially the whole plant life cycle. Increased growth rate during the early stages in the life cycle of a plant may reflect enhanced vigour. The increase in growth rate may alter the harvest cycle of a plant allowing plants to be sown later and/or harvested sooner than would otherwise be possible (a similar effect may be obtained with earlier flowering time). If the growth rate is sufficiently increased, it may allow for the further sowing of seeds of the same plant species (for example sowing and harvesting of rice plants followed by sowing and harvesting of further rice plants all within one conventional growing period). Similarly, if the growth rate is sufficiently increased, it may allow for the further sowing of seeds of different plants species (for example the sowing and harvesting of corn plants followed by, for example, the sowing and optional harvesting of soybean, potato or any other suitable plant). Harvesting additional times from the same rootstock in the case of some crop plants may also be possible. Altering the harvest cycle of a plant may lead to an increase in annual biomass production per acre (due to an increase in the number of times (say in a year) that any particular plant may be grown and harvested). An increase in growth rate may also allow for the cultivation of transgenic plants in a wider geographical area than their wild-type counterparts, since the territorial limitations for growing a crop are often determined by adverse environmental conditions either at the time of planting (early season) or at the time of harvesting (late season). Such adverse conditions may be avoided if the harvest cycle is shortened. The growth rate may be determined by deriving various parameters from growth curves, such parameters may be: T-Mid (the time taken for plants to reach 50% of their maximal size) and T-90 (time taken for plants to reach 90% of their maximal size), amongst others.

[0364] According to a preferred feature of the present invention, performance of the methods of the invention gives plants having an increased growth rate relative to control plants. Therefore, according to the present invention, there is provided a method for increasing the growth rate of plants, which method comprises modulating expression, preferably increasing expression, in a plant of a nucleic acid encoding a CKI polypeptide as defined herein. In a particular embodiment, performance of the methods of the present invention gives plants with increased early vigour.

[0365] An increase in yield and/or growth rate occurs whether the plant is under non-stress conditions or whether the plant is exposed to various stresses compared to control plants. Plants typically respond to exposure to stress by growing more slowly. In conditions of severe stress, the plant may even stop growing altogether. Mild stress on the other hand is defined herein as being any stress to which a plant is exposed which does not result in the plant ceasing to grow altogether without the capacity to resume growth. Mild stress in the sense of the invention leads to a reduction in the growth of the stressed plants of less than 40%, 35% or 30%, preferably less than 25%, 20% or 15%, more preferably less than 14%, 13%, 12%, 11% or 10% or less in comparison to the control plant under non-stress conditions. Due to advances in agricultural practices (irrigation, fertilization, pesticide treatments) severe stresses are not often encountered in cultivated crop plants. As a consequence, the compromised growth induced by mild stress is often an undesirable feature for agriculture. Mild stresses are the everyday biotic and/or abiotic (environmental) stresses to which a plant is exposed. Abiotic stresses may be due to drought or excess water, anaerobic stress, salt stress, chemical toxicity, oxidative stress and hot, cold or freezing temperatures. The abiotic stress may be an osmotic stress caused by a water stress (particularly due to drought), salt stress, oxidative stress or an ionic stress. Biotic stresses are typically those stresses caused by pathogens, such as bacteria, viruses, fungi and insects.

[0366] In particular, the methods of the present invention may be performed under non-stress conditions or under conditions of mild drought to give plants having increased yield relative to control plants. As reported in Wang et al. (Planta (2003) 218: 1-14), abiotic stress leads to a series of morphological, physiological, biochemical and molecular changes that adversely affect plant growth and productivity. Drought, salinity, extreme temperatures and oxidative stress are known to be interconnected and may induce growth and cellular damage through similar mechanisms. Rabbani et al. (Plant Physiol (2003) 133: 1755-1767) describes a particularly high degree of “cross talk” between drought stress and high-salinity stress. For example, drought and/or salinisation are manifested primarily as osmotic stress, resulting in the disruption of homeostasis and ion distribution in the cell. Oxidative stress, which frequently accompanies high or low temperature, salinity or drought stress, may cause denaturing of functional and structural proteins. As a consequence, these diverse environmental stresses often activate similar cell signalling pathways and cellular responses, such as the production of stress proteins, up-regulation of anti-oxidants, accumulation of compatible solutes and growth arrest. The term “non-stress” conditions as used herein are those environmental conditions that allow optimal growth of plants. Persons skilled in the art are aware of normal soil conditions and climatic conditions for a given location. Plants with optimal growth conditions, (grown under non-stress conditions) typically yield in increasing order of preference at least 90%, 87%, 85%, 83%, 80%, 77% or 75% of the average production of such plant in a given environment. Average production may be calculated on harvest and/or season basis. Persons skilled in the art are aware of average yield productions of a crop.

[0367] Performance of the methods of the invention gives plants grown under non-stress conditions or under mild drought conditions increased yield and/or increased early vigour, relative to control plants grown under comparable conditions. Therefore, according to the present invention, there is provided a method for increasing yield and/or early vigour in plants grown under non-stress conditions or under mild drought conditions, which method comprises increasing expression in a plant of a nucleic acid encoding a CKI polypeptide.

[0368] Performance of the methods of the invention gives plants grown under conditions of nutrient deficiency, particularly under conditions of nitrogen deficiency, increased yield relative to control plants grown under comparable conditions. Therefore, according to the present invention, there is provided a method for increasing yield in plants grown under conditions of nutrient deficiency, which method comprises increasing expression in a plant of a nucleic acid encoding a CKI polypeptide. Nutrient deficiency may result from a lack of nutrients such as nitrogen, phosphates and other phosphorous-containing compounds, potassium, calcium, cadmium, magnesium, manganese, iron and boron, amongst others.

[0369] The present invention encompasses plants or parts thereof (including seeds) obtainable by the methods according to the present invention. The plants or parts thereof comprise a nucleic acid transgene encoding a CKI polypeptide as defined above.

[0370] The invention also provides genetic constructs and vectors to facilitate introduction and/or expression in plants of nucleic acids encoding CKI polypeptides. The gene constructs may be inserted into vectors, which may be commercially available, suitable for transforming into plants and suitable for expression of the gene of interest in the transformed cells. The invention also provides use of a gene construct as defined herein in the methods of the invention.

[0371] More specifically, the present invention provides a construct comprising:
[0372] (a) a nucleic acid encoding a CKI polypeptide as defined above;
[0373] (b) one or more control sequences capable of driving expression of the nucleic acid sequence of (a); and optionally
[0374] (c) a transcription termination sequence.

[0375] Preferably, the nucleic acid encoding a CKI polypeptide is as defined above. The term “control sequence” and “termination sequence” are as defined herein.

[0376] Plants are transformed with a vector comprising any of the nucleic acids described above. The skilled artisan is well aware of the genetic elements that must be present on the vector in order to successfully transform, select and propagate host cells containing the sequence of interest. The sequence of interest is operably linked to one or more control sequences (at least to a promoter).

[0377] Advantageously, any type of promoter, whether natural or synthetic, may be used to drive expression of the nucleic acid sequence. A seed specific promoter is particularly useful in the methods of the invention, preferably, the promoter is an embryo specific promoter. See the “Definitions” section herein for definitions of the various promoter types. Also useful in the methods of the invention is a constitutive promoter.

[0378] It should be clear that the applicability of the present invention is not restricted to the CKI polypeptide-encoding nucleic acid represented by SEQ ID NO: 173, nor is the applicability of the invention restricted to expression of a CKI polypeptide-encoding nucleic acid when driven by a seed specific promoter, or when driven by a constitutive promoter.

[0379] The seed specific promoter is preferably a WSI18 promoter, preferably a WSI18 promoter from rice. Further preferably the seed specific promoter is represented by a nucleic acid sequence substantially similar to SEQ ID NO: 175, most preferably the seed specific promoter is as represented by SEQ ID NO: 175. See the “Definitions” section herein for further examples of seed specific promoters.

[0380] Optionally, one or more terminator sequences may be used in the construct introduced into a plant. Additional regulatory elements may include transcriptional as well as translational enhancers. Those skilled in the art will be aware of terminator and enhancer sequences that may be suitable for use in performing the invention. An intron sequence may also be added to the 5′ untranslated region (UTR) or in the coding sequence to increase the amount of the mature message that accumulates in the cytosol, as described in the definitions section. Other control sequences (besides promoter, enhancer, silencer, intron sequences, 3′UTR and/or 5′UTR regions) may be protein and/or RNA stabilizing elements. Such sequences would be known or may readily be obtained by a person skilled in the art.

[0381] The genetic constructs of the invention may further include an origin of replication sequence that is required for maintenance and/or replication in a specific cell type. One example is when a genetic construct is required to be maintained in a bacterial cell as an episomal genetic element (e.g. plasmid or cosmid molecule). Preferred origins of replication include, but are not limited to, the f1-ori and colE1.

[0382] For the detection of the successful transfer of the nucleic acid sequences as used in the methods of the invention and/or selection of transgenic plants comprising these nucleic acids, it is advantageous to use marker genes (or reporter genes). Therefore, the genetic construct may optionally comprise a selectable marker gene. Selectable markers are described in more detail in the “definitions” section herein. The marker genes may be removed or excised from the transgenic cell once they are no longer needed. Techniques for marker removal are known in the art, useful techniques are described above in the definitions section.

[0383] The invention also provides a method for the production of transgenic plants having enhanced yield-related traits relative to control plants, comprising introduction and expression in a plant of any nucleic acid encoding a CKI polypeptide as defined hereinabove.

[0384] More specifically, the present invention provides a method for the production of transgenic plants having increased enhanced yield-related traits, particularly increased early vigour and/or increased yield, which method comprises:
[0385] (i) introducing and expressing in a plant or plant cell a CKI polypeptide-encoding nucleic acid; and
[0386] (ii) cultivating the plant cell under conditions promoting plant growth and development.

[0387] The nucleic acid of (i) may be any of the nucleic acids capable of encoding a CKI polypeptide as defined herein.

[0388] The nucleic acid may be introduced directly into a plant cell or into the plant itself (including introduction into a tissue, organ or any other part of a plant). According to a preferred feature of the present invention, the nucleic acid is preferably introduced into a plant by transformation. The term “transformation” is described in more detail in the “definitions” section herein.

[0389] The genetically modified plant cells can be regenerated via all methods with which the skilled worker is familiar. Suitable methods can be found in the abovementioned publications by S. D. Kung and R. Wu, Potrykus or Höfgen and Willmitzer.

[0390] Generally after transformation, plant cells or cell groupings are selected for the presence of one or more markers which are encoded by plant-expressible genes co-transferred with the gene of interest, following which the transformed material is regenerated into a whole plant. To select transformed plants, the plant material obtained in the transformation is, as a rule, subjected to selective conditions so that transformed plants can be distinguished from untransformed plants. For example, the seeds obtained in the above-described manner can be planted and, after an initial growing period, subjected to a suitable selection by spraying. A further possibility consists in growing the seeds, if appropriate after sterilization, on agar plates using a suitable selection agent so that only the transformed seeds can grow into plants. Alternatively, the transformed plants are screened for the presence of a selectable marker such as the ones described above.

[0391] Following DNA transfer and regeneration, putatively transformed plants may also be evaluated, for instance using Southern analysis, for the presence of the gene of interest, copy number and/or genomic organisation. Alternatively or additionally, expression levels of the newly introduced DNA may be monitored using Northern and/or Western analysis, both techniques being well known to persons having ordinary skill in the art.

[0392] The generated transformed plants may be propagated by a variety of means, such as by clonal propagation or classical breeding techniques. For example, a first generation (or T1) transformed plant may be selfed and homozygous second-generation (or T2) transformants selected, and the T2 plants may then further be propagated through classical breeding techniques. The generated transformed organisms may take a variety of forms. For example, they may be chimeras of transformed cells and non-transformed cells; clonal transformants (e.g., all cells transformed to contain the expression cassette); grafts of transformed and untransformed tissues (e.g., in plants, a transformed rootstock grafted to an untransformed scion).

[0393] The present invention clearly extends to any plant cell or plant produced by any of the methods described herein, and to all plant parts and propagules thereof. The present invention extends further to encompass the progeny of a primary transformed or transfected cell, tissue, organ or whole plant that has been produced by any of the aforementioned methods, the only requirement being that progeny exhibit the same genotypic and/or phenotypic characteristic(s) as those produced by the parent in the methods according to the invention.

[0394] The invention also includes host cells containing an isolated nucleic acid encoding a CKI polypeptide as defined hereinabove. Preferred host cells according to the invention are plant cells. Host plants for the nucleic acids or the vector used in the method according to the invention, the expression cassette or construct or vector are, in principle, advantageously all plants, which are capable of synthesizing the polypeptides used in the inventive method.

[0395] The methods of the invention are advantageously applicable to any plant. Plants that are particularly useful in the methods of the invention include all plants which belong to the superfamily Viridiplantae, in particular monocotyledonous and dicotyledonous plants including fodder or forage legumes, ornamental plants, food crops, trees or shrubs. According to a preferred embodiment of the present invention, the plant is a crop plant. Examples of crop plants include soybean, sunflower, canola, alfalfa, rapeseed, cotton, tomato, potato and tobacco. Further preferably, the plant is a monocotyledonous plant. Examples of monocotyledonous plants include sugarcane. More preferably the plant is a cereal. Examples of cereals include rice, maize, wheat, barley, millet, rye, triticale, sorghum and oats.

[0396] The invention also extends to harvestable parts of a plant such as, but not limited to seeds, leaves, fruits, flowers, stems, roots, rhizomes, tubers and bulbs. The invention furthermore relates to products derived, preferably directly derived, from a harvestable part of such a plant, such as dry pellets or powders, oil, fat and fatty acids, starch or proteins.

[0397] According to a preferred feature of the invention, the modulated expression is increased expression. Methods for increasing expression of nucleic acids or genes, or gene products, are well documented in the art and examples are provided in the definitions section.

[0398] As mentioned above, a preferred method for modulating (preferably, increasing) expression of a nucleic acid encoding a CKI polypeptide is by introducing and expressing in a plant a nucleic acid encoding a CKI polypeptide; however the effects of performing the method, i.e. enhancing yield-related traits may also be achieved using other well known techniques, including but not limited to T-DNA activation tagging, TILLING, homologous recombination. A description of these techniques is provided in the definitions section.

[0399] The present invention also encompasses use of nucleic acids encoding CKI polypeptides as described herein and use of these CKI polypeptides in enhancing any of the aforementioned yield-related traits in plants.

[0400] Nucleic acids encoding CKI polypeptide described herein, or the CKI polypeptides themselves, may find use in breeding programmes in which a DNA marker is identified which may be genetically linked to a CKI polypeptide-encoding gene. The nucleic acids/genes, or the CKI polypeptides themselves may be used to define a molecular marker. This DNA or protein marker may then be used in breeding programmes to select plants having enhanced yield-related traits as defined hereinabove in the methods of the invention.

[0401] Allelic variants of a CKI polypeptide-encoding nucleic acid/gene may also find use in marker-assisted breeding programmes. Such breeding programmes sometimes require introduction of allelic variation by mutagenic treatment of the plants, using for example EMS mutagenesis; alternatively, the programme may start with a collection of allelic variants of so called “natural” origin caused unintentionally. Identification of allelic variants then takes place, for example, by PCR. This is followed by a step for selection of superior allelic variants of the sequence in question and which give increased yield. Selection is typically carried out by monitoring growth performance of plants containing different allelic variants of the sequence in question. Growth performance may be monitored in a greenhouse or in the field. Further optional steps include crossing plants in which the superior allelic variant was identified with another plant. This could be used, for example, to make a combination of interesting phenotypic features.

[0402] Nucleic acids encoding CKI polypeptides may also be used as probes for genetically and physically mapping the genes that they are a part of, and as markers for traits linked to those genes. Such information may be useful in plant breeding in order to develop lines with desired phenotypes. Such use of CKI polypeptide-encoding nucleic acids requires only a nucleic acid sequence of at least 15 nucleotides in length. The CKI polypeptide-encoding nucleic acids may be used as restriction fragment length polymorphism (RFLP) markers. Southern blots (Sambrook J, Fritsch E F and Maniatis T (1989) Molecular Cloning, A Laboratory Manual) of restriction-digested plant genomic DNA may be probed with the CKI-encoding nucleic acids. The resulting banding patterns may then be subjected to genetic analyses using computer programs such as MapMaker (Lander et al. (1987) Genomics 1: 174-181) in order to construct a genetic map. In addition, the nucleic acids may be used to probe Southern blots containing restriction endonuclease-treated genomic DNAs of a set of individuals representing parent and progeny of a defined genetic cross. Segregation of the DNA polymorphisms is noted and used to calculate the position of the CKI polypeptide-encoding nucleic acid in the genetic map previously obtained using this population (Botstein et al. (1980) Am. J. Hum. Genet, 32:314-331).

[0403] The production and use of plant gene-derived probes for use in genetic mapping is described in Bernatzky and Tanksley (1986) Plant Mal. Biol, Reporter 4: 37-41. Numerous publications describe genetic mapping of specific cDNA clones using the methodology outlined above or variations thereof. For example, F2 intercross populations, backcross populations, randomly mated populations, near isogenic lines, and other sets of individuals may be used for mapping. Such methodologies are well known to those skilled in the art.

[0404] The nucleic acid probes may also be used for physical mapping (i.e., placement of sequences on physical maps; see Hoheisel et al. In: Non-mammalian Genomic Analysis: A Practical Guide, Academic press 1996, pp. 319-346, and references cited therein).

[0405] In another embodiment, the nucleic acid probes may be used in direct fluorescence in situ hybridisation (FISH) mapping (Trask (1991) Trends Genet. 7:149-154). Although current methods of FISH mapping favour use of large clones (several kb to several hundred kb; see Lean et al. (1995) Genome Res. 5:13-20), improvements in sensitivity may allow performance of FISH mapping using shorter probes.

[0406] A variety of nucleic acid amplification-based methods for genetic and physical mapping may be carried out using the nucleic acids. Examples include allele-specific amplification (Kazazian (1989) J. Lab. Clin. Med. 11:95-96), polymorphism of PCR-amplified fragments (CAPS; Sheffield et al. (1993) Genomics 16:325-332), allele-specific ligation (Landegren et al. (1988) Science 241:1077-1080), nucleotide extension reactions (Sokolov (1990) Nucleic Acid Res. 18:3671), Radiation Hybrid Mapping (Walter et al. (1997) Nat. Genet. 7:22-28) and Happy Mapping (Dear and Cook (1989) Nucleic Acid Res. 17:6795-6807). For these methods, the sequence of a nucleic acid is used to design and produce primer pairs for use in the amplification reaction or in primer extension reactions. The design of such primers is well known to those skilled in the art. In methods employing PCR-based genetic mapping, it may be necessary to identify DNA sequence differences between the parents of the mapping cross in the region corresponding to the instant nucleic acid sequence. This, however, is generally not necessary for mapping methods.

[0407] The methods according to the present invention result in plants having enhanced yield-related traits, as described hereinbefore. These traits may also be combined with other economically advantageous traits, such as further yield-enhancing traits, tolerance to other abiotic and biotic stresses, traits modifying various architectural features and/or biochemical and/or physiological features.

### IV. Plant Homeodomain Finger-Homeodomain (PHDf-HD) Polypeptide

[0408] Surprisingly, it has now been found that modulating, preferably increasing, expression in a plant of a nucleic acid sequence encoding a PHDf-HD polypeptide gives plants having enhanced yield-related traits, preferably enhanced seed yield-related traits, relative to control plants. According to a first embodiment, the present invention provides a method for enhancing yield-related traits, preferably enhancing seed yield-related traits, in plants relative to control plants, comprising modulating, preferably increasing, expression in a plant of a nucleic acid sequence encoding a PHDf-HD polypeptide.

[0409] A preferred method for modulating, preferably increasing, expression of a nucleic acid sequence encoding a PHDf-HD polypeptide is by introducing and expressing in a plant a nucleic acid sequence encoding a PHDf-HD polypeptide.

[0410] Any reference hereinafter to a “protein useful in the methods of the invention” is taken to mean a PHDf-HD polypeptide as defined herein. Any reference hereinafter to a “nucleic acid sequence useful in the methods of the invention” is taken to mean a nucleic acid sequence capable of encoding such a PHDf-HD polypeptide. The nucleic acid sequence to be introduced into a plant (and therefore useful in performing the methods of the invention) is any nucleic acid sequence encoding the type of polypeptide, which will now be described, hereafter also named “PHDf-HD nucleic acid sequence” or “PHDf-HD gene”.

[0411] A “PHDf-HD polypeptide” as defined herein refers to any polypeptide comprising: (i) a domain having at least 25%, 30%, 35%, 40%, 45%, 50%, 55%, 60%, 65%, 70%, 75%, 80%, 85%, 90%, 95%, 98%, 99% or more amino acid sequence identity to a leucine zipper/plant homeodomain finger (ZIP/PHDf) domain as represented by SEQ ID NO: 233; and (ii) a domain having at least 25%, 30%, 35%, 40%, 45%, 50%, 55%, 60%, 65%, 70%, 75%, 80%, 85%, 90%, 95%, 98%, 99% or more amino acid sequence identity to a homeodomain (HD) as represented by SEQ ID NO: 234.

[0412] Alternatively or additionally, a “PHDf-HD polypeptide” as defined herein refers to any polypeptide comprising: (i) a PHD domain as represented by PFAM00628; and (ii) an HD as represented by PFAM00046.

[0413] Alternatively or additionally, a “PHDf-HD polypeptide” as defined herein refers to any polypeptide sequence which when used in the construction of a HD phylogenetic tree, such as the one depicted in FIG. 13, clusters with the PHDf-HD group of polypeptides comprising the polypeptide sequence as represented by SEQ ID NO: 180, rather than with any other HD group.

[0414] Alternatively or additionally, a “PHDf-HD polypeptide” as defined herein refers to any polypeptide having in increasing order of preference at least 25%, 30%, 35%, 40%, 45%, 50%, 55%, 60%, 65%, 70%, 75%, 80%, 85%, 90%, 95%, 98%, 99% or more amino acid sequence identity to the PHDf-HD polypeptide as represented by SEQ ID NO: 180 or to any of the polypeptide sequences given in Table D1 herein.

[0415] The term “domain” and “motif” is defined in the “definitions” section herein. Specialist databases exist for the identification of domains, for example, SMART (Schultz et al. (1998) Proc. Natl. Acad. Sci, USA 95, 5857-5864; Letunic et al. (2002) Nucleic Acids Res 30, 242-244, InterPro (Mulder et al., (2003) Nucl. Acids. Res. 31, 315-318, Prosite (Bucher and Bairoch (1994), A generalized profile syntax for biomolecular sequences motifs and its function in automatic sequence interpretation. (In) ISMB-94; Proceedings 2nd International Conference on Intelligent Systems for Molecular Biology. Altman R., Brutlag D., Karp P., Lathrop R., Searls D., Eds., pp 53-61, AAAI Press, Menlo Park; Hula et al., Nucl. Acids. Res. 32:D134-D137, (2004), or Pfam (Bateman et al., Nucleic Acids Research 30(1): 276-280 (2002). A set of tools for in silico analysis of protein sequences is available on the ExPASy proteomics server (Swiss Institute of Bioinformatics (Gasteiger et al., ExPASy: the proteomics server for in-depth protein knowledge and analysis, Nucleic Acids Res. 31:3784-3788 (2003)). Domains may also be identified using routine techniques, such as by sequence alignment. Analysis of the polypeptide sequence of SEQ ID NO: 180 is presented below in Examples 30 and 32 herein. For example, a PHDf-HD polypeptide as represented by SEQ ID NO: 180 comprises a PHD finger with a Pfam entry PF00628, and a HD with Pfam entry PF00046.

[0416] Methods for the alignment of sequences for comparison are well known in the art, such methods include GAP, BESTFIT, BLAST, FASTA and TFASTA. GAP uses the algorithm of Needleman and Wunsch ((1970) J Mol Biol 48: 443-453) to find the global (i.e. spanning the complete sequences) alignment of two sequences that maximizes the number of matches and minimizes the number of gaps. The BLAST algorithm (Altschul et al. (1990) J Mol Biol 215: 403-10) calculates percent sequence identity and performs a statistical analysis of the similarity between the two sequences. The software for performing BLAST analysis is publicly available through the National Centre for Biotechnology Information (NCBI). Homologues may readily be identified using, for example, the ClustalW multiple sequence alignment algorithm (version 1.83), with the default pairwise alignment parameters, and a scoring method in percentage. Global percentages of similarity and identity may also be determined using one of the methods available in the MatGAT software package (Campanella et al., BMC Bioinformatics. 2003 Jul. 10; 4:29. MatGAT: an application that generates similarity/identity matrices using protein or DNA sequences.). Minor manual editing may be performed to optimise alignment between conserved motifs, as would be apparent to a person skilled in the art. Furthermore, instead of using full-length sequences for the identification of homologues, specific domains may also be used. The sequence identity values may be determined over the entire nucleic acid sequence or polypeptide sequence or over selected domains or conserved motif(s), using the programs mentioned above using the default parameters. Example 31 herein describes in Table D2 the percentage identity between the ZIP/PHDf as represented by SEQ ID NO: 233 and ZIP/PHDf of the PHDf-HD polypeptides listed in Table D1, and in Table D3 the percentage identity between the HD as represented by SEQ ID NO: 234 and the HD of the PHDf-HD polypeptides listed in Table D1 of Example 29.

[0417] Furthermore, amino acid sequences enriched in basic (Lys and Arg) or acidic (Glu and Asp) amino acids, respectively called basic and acidic stretches, may also readily be identified simply by eye inspection (FIG. 17). Alternatively primary amino acid composition (in %) may be calculated to determine if a polypeptide domain is rich in specific amino acids using software programs from the ExPASy server, in particular the ProtParam tool (Gasteiger E et al. (2003) ExPASy: the proteomics server for in-depth protein knowledge and analysis. Nucleic Acids Res 31:3784-3788). The composition of the protein of interest may then be compared to the average amino acid composition (in %) in the Swiss-Prot Protein Sequence data bank.

[0418] Coiled coils are important to identify for protein-protein interactions, such as oligomerization, either of identical proteins, of proteins of the same family, or of unrelated proteins. A PHDf-HD polypeptide presents at least one predicted coiled coil region. Recently much progress has been made in computational prediction of coiled coils from sequence data. Among algorithms well known to a person skilled in the art are available at the ExPASy Proteomics tools COILS, PAIRCOIL, PAIRCOIL2, MULTICOIL, or MARCOIL, hosted by the Swiss Institute for Bioinformatics. In Example 33 and FIG. 16, are shown respectively the numerical and graphical results of SEQ ID NO: 180 as produced by the COILS algorithm analysis. Two N-terminal predicted coiled coil domains are identified in a PHDf-HD polypeptide sequence as represented by SEQ ID NO: 180, with a strong probability. A C-terminal coiled coil is also predicted, with a lower probability.

[0419] The task of protein subcellular localisation prediction is important and well studied. Knowing a protein's localisation helps elucidate its function. Experimental methods for protein localization range from immunolocalization to tagging of proteins using green fluorescent protein (GFP). Such methods are accurate although labor-intensive compared with computational methods. Recently much progress has been made in computational prediction of protein localisation from sequence data. Among algorithms well known to a person skilled in the art are available at the ExPASy Proteomics tools hosted by the Swiss Institute for Bioinformatics, for example, PSort, TargetP, ChloroP, LocTree, Predotar, LipoP, MITOPROT, PATS, PTS1, SignalP and others. The identification of subcellular localisation of the polypeptide of the invention is shown in Example 34. In particular SEQ ID NO: 180 of the present invention is assigned to the nuclear compartment of eucaryotic cells.

[0420] Furthermore, PHDf-HD polypeptides useful in the methods of the present invention (at least in their native form) typically, but not necessarily, have transcriptional regulatory activity and capacity to interact with other proteins. Therefore, PHDf-HD polypeptides with reduced transcriptional regulatory activity, without transcriptional regulatory activity, with reduced protein-protein interaction capacity, or with no protein-protein interaction capacity, may equally be useful in the methods of the present invention. DNA-binding activity and protein-protein interactions may readily be determined in vitro or in vivo using techniques well known in the art (for example in Current Protocols in Molecular Biology, Volumes 1 and 2, Ausubel et al. (1994), Current Protocols). To determine the DNA binding activity of PHDf-HD polypeptides, several assays are available, such as DNA binding gel-shift assays (or gel retardation assays; Korfhage et al. (1994) Plant C 6: 695-708), in vitro DNA binding assays (Schindler et al. (1993) Plant J 4(1): 137-150), or transcriptional activation of PHDf-HD polypeptides in yeast, animal and plant cells (Halbach et al. (2000) Nucleic Acid Res 28(18): 3542-3550). Specific DNA binding sequences can be determined using the random oligonucleotide selection technique (Viola & Gonzalez (May 26, 2007) Biochemistry).

[0421] The present invention is illustrated by transforming plants with the nucleic acid sequence represented by SEQ ID NO: 179, encoding the polypeptide sequence of SEQ ID NO: 180. However, performance of the invention is not restricted to these sequences; the methods of the invention may advantageously be performed using any nucleic acid sequence encoding PHDf-HD or PHDf-HD polypeptide as defined herein.

[0422] Examples of nucleic acid sequences encoding PHDf-HD polypeptides are given in Table D1 of Example 29 herein. Such nucleic acid sequences are useful in performing the methods of the invention. The polypeptide sequences given in Table D1 of Example 29 are example sequences of orthologues and paralogues of the PHDf-HD polypeptide represented by SEQ ID NO: 180, the terms “orthologues” and “paralogues” being as defined herein. Further orthologues and paralogues may readily be identified by performing a so-called reciprocal blast search. Typically, this involves a first BLAST involving BLASTing a query sequence (for example using any of the sequences listed in Table D1 of Example 29) against any sequence database, such as the publicly available NCBI database. BLASTN or TBLASTX (using standard default values) are generally used when starting from a nucleotide sequence, and BLASTP or TBLASTN (using standard default values) when starting from a protein sequence. The BLAST results may optionally be filtered. The full-length sequences of either the filtered results or non-filtered results are then BLASTed back (second BLAST) against sequences from the organism from which the query sequence is derived (where the query sequence is SEQ ID NO: 179 or SEQ ID NO: 180, the second BLAST would therefore be against rice sequences). The results of the first and second BLASTs are then compared. A paralogue is identified if a high-ranking hit from the first blast is from the same species as from which the query sequence is derived, a BLAST back then ideally results in the query sequence amongst the highest hits; an orthologue is identified if a high-ranking hit in the first BLAST is not from the same species as from which the query sequence is derived, and preferably results upon BLAST back in the query sequence being among the highest hits.

[0423] High-ranking hits are those having a low E-value. The lower the E-value, the more significant the score (or in other words the lower the chance that the hit was found by chance). Computation of the E-value is well known in the art. In addition to E-values, comparisons are also scored by percentage identity. Percentage identity refers to the number of identical nucleotides (or amino acids) between the two compared nucleic acid (or polypeptide) sequences over a particular length. In the case of large families, ClustalW may be used, followed by a neighbour joining tree, to help visualize clustering of related genes and to identify orthologues and paralogues. Any sequence clustering within the group comprising SEQ ID NO: 180 (encircled in FIG. 29) would be considered to fall within the aforementioned definition of a PHDf-HD polypeptide, and would be considered suitable for use in the methods of the invention.

[0424] Nucleic acid variants may also be useful in practising the methods of the invention. Examples of such variants include nucleic acid sequences encoding homologues and derivatives of any one of the polypeptide sequences given in Table D1 of Example 29, the terms “homologue” and “derivative” being as defined herein. Also useful in the methods of the invention are nucleic acid sequences encoding homologues and derivatives of orthologues or paralogues of any one of the polypeptide sequences given in Table D1 of Example 29. Homologues and derivatives useful in the methods of the present invention have substantially the same biological and functional activity as the unmodified protein from which they are derived.

[0425] Further nucleic acid variants useful in practising the methods of the invention include portions of nucleic acid sequences encoding PHDf-HD polypeptides, nucleic acid sequences hybridising to nucleic acid sequences encoding PHDf-HD polypeptides, splice variants of nucleic acid sequences encoding PHDf-HD polypeptides, allelic variants of nucleic acid sequences encoding PHDf-HD polypeptides and variants of nucleic acid sequences encoding PHDf-HD polypeptides obtained by gene shuffling. The terms hybridising sequence, splice variant, allelic variant and gene shuffling are as described herein.

[0426] Nucleic acid sequences encoding PHDf-HD polypeptides need not be full-length nucleic acid sequences, since performance of the methods of the invention does not rely on the use of full-length nucleic acid sequences. According to the present invention, there is provided a method for enhancing yield-related traits, preferably enhancing seed yield-related traits, in plants, comprising introducing and expressing in a plant a portion of any one of the nucleic acid sequences given in Table D1 of Example 29, or a portion of a nucleic acid sequence encoding an orthologue, paralogue or homologue of any of the polypeptide sequences given in Table D1 of Example 29.

[0427] A portion of a nucleic acid sequence may be prepared, for example, by making one or more deletions to the nucleic acid sequence. The portions may be used in isolated form or they may be fused to other coding (or non-coding) sequences in order to, for example, produce a protein that combines several activities. When fused to other coding sequences, the resultant polypeptide produced upon translation may be bigger than that predicted for the protein portion.

[0428] Portions useful in the methods of the invention, encode a PHDf-HD polypeptide as defined herein, and have substantially the same biological activity as the polypeptide sequences given in Table D1 of Example 29. Preferably, the portion is a portion of any one of the nucleic acid sequences given in Table D1 of Example 29, or is a portion of a nucleic acid sequence encoding an orthologue or paralogue of any one of the polypeptide sequences given in Table D1 of Example 29. Preferably the portion is, in increasing order of preference at least 600, 800, 1000, 1200, 1400, 1600, 1800, 2000, 2200, 2400, 2600, 2800 consecutive nucleotides in length, the consecutive nucleotides being of any one of the nucleic acid sequences given in Table D1 of Example 29, or of a nucleic acid sequence encoding an orthologue or paralogue of any one of the polypeptide sequences given in Table D1 of Example 29. Most preferably the portion is a portion of the nucleic acid sequence of SEQ ID NO: 179. Preferably, the portion encodes a polypeptide sequence which when used in the construction of a HID phylogenetic tree, such as the one depicted in FIG. 13, clusters with the group of PHDf-HD polypeptides comprising the polypeptide sequence represented by SEQ ID NO: 180 rather than with any other HD group.

[0429] Another nucleic acid sequence variant useful in the methods of the invention is a nucleic acid sequence capable of hybridising, under reduced stringency conditions, preferably under stringent conditions, with a nucleic acid sequence encoding a PHDf-HD polypeptide as defined herein, or with a portion as defined herein.

[0430] According to the present invention, there is provided a method for enhancing yield-related traits in plants, preferably enhancing seed yield-related traits, comprising introducing and expressing in a plant a nucleic acid sequence capable of hybridizing to any one of the nucleic acid sequences given in Table D1 of Example 29, or comprising introducing and expressing in a plant a nucleic acid sequence capable of hybridising to a nucleic acid sequence encoding an orthologue, paralogue or homologue of any of the nucleic acid sequences given in Table D1 of Example 29.

[0431] Hybridising sequences useful in the methods of the invention encode a PHDf-HD polypeptide as defined herein, and have substantially the same biological activity as the polypeptide sequences given in Table D1 of Example 29. Preferably, the hybridising sequence is capable of hybridising to any one of the nucleic acid sequences given in Table D1 of Example 29, or to a portion of any of these sequences, a portion being as defined above, or wherein the hybridising sequence is capable of hybridising to a nucleic acid sequence encoding an orthologue or paralogue of any one of the polypeptide sequences given in Table D1 of Example 29. Most preferably, the hybridising sequence is capable of hybridising to a nucleic acid sequence as represented by SEQ ID NO: 179 or to a portion thereof.

[0432] Preferably, the hybridising sequence encodes a polypeptide sequence which when used in the construction of a HD phylogenetic tree, such as the one depicted in FIG. 13, clusters with the group of PHDf-HD polypeptides comprising the polypeptide sequence represented by SEQ ID NO: 180 rather than with any other HO group.

[0433] Another nucleic acid sequence variant useful in the methods of the invention is a splice variant encoding a PHDf-HD polypeptide as defined hereinabove, a splice variant being as defined herein.

[0434] According to the present invention, there is provided a method for enhancing yield-related traits in plants, preferably enhancing seed yield-related traits, comprising introducing and expressing in a plant a splice variant of any one of the nucleic acid sequences given in Table D1 of Example 29, or a splice variant of a nucleic acid sequence encoding an orthologue, paralogue or homologue of any of the polypeptide sequences given in Table D1 of Example 29.

[0435] Preferred splice variants are splice variants of a nucleic acid sequence represented by SEQ ID NO: 179, or a splice variant of a nucleic acid sequence encoding an orthologue or paralogue of SEQ ID NO: 180. Preferably, the polypeptide sequence encoded by the splice variant, when used in the construction of a HD phylogenetic tree, such as the one depicted in FIG. 13, clusters with the group of PHDf-HD polypeptides comprising the polypeptide sequence represented by SEQ ID NO: 180 rather than with any other HD group.

[0436] Another nucleic acid sequence variant useful in performing the methods of the invention is an allelic variant of a nucleic acid sequence encoding a PHDf-HD polypeptide as defined hereinabove, an allelic variant being as defined herein.

[0437] According to the present invention, there is provided a method for enhancing yield-related traits in plants, preferably enhancing seed yield-related traits, comprising introducing and expressing in a plant an allelic variant of any one of the nucleic acid sequences given in Table D1 of Example 29, or comprising introducing and expressing in a plant an allelic variant of a nucleic acid sequence encoding an orthologue, paralogue or homologue of any of the polypeptide sequences given in Table D1 of Example 29.

[0438] The allelic variants useful in the methods of the present invention have substantially the same biological activity as the polypeptide of SEQ ID NO: 180 and any of the polypeptide sequences depicted in Table D1 of Example 29. Allelic variants exist in nature, and encompassed within the methods of the present invention is the use of these natural alleles. Preferably, the allelic variant is an allelic variant of SEQ ID NO: 179 or an allelic variant of a nucleic acid sequence encoding an orthologue or paralogue of SEQ ID NO: 180. Preferably, the polypeptide sequence encoded by the allelic variant, when used in the construction of a HD phylogenetic tree, such as the one depicted in FIG. 13, clusters with the PHDf-HD polypeptides comprising the polypeptide sequence represented by SEQ ID NO: 180 rather than with any other HD group.

[0439] Gene shuffling or directed evolution may also be used to generate variants of nucleic acid sequences encoding PHDf-HD polypeptides as defined above; the term “gene shuffling” being as defined herein.

[0440] According to the present invention, there is provided a method for enhancing yield-related traits in plants, preferably enhancing seed yield-related traits, comprising introducing and expressing in a plant a variant of any one of the nucleic acid sequences given in Table D1 of Example 29, or comprising introducing and expressing in a plant a variant of a nucleic acid sequence encoding an orthologue, paralogue or homologue of any of the polypeptide sequences given in Table D1 of Example 29, which variant nucleic acid sequence is obtained by gene shuffling.

[0441] Advantageously, the present invention provides hitherto unknown PHDf-HD nucleic acid and polypeptide sequences.

[0442] According to a further embodiment of the present invention, there is provided an isolated nucleic acid molecule comprising:
[0443] (i) a nucleic acid represented by SEQ ID NO: 242;
[0444] (ii) a nucleic acid or fragment thereof that is complementary to SEQ ID NO: 242;
[0445] (iii) a nucleic acid encoding an JMJC polypeptide having, in increasing order of preference, at least 70%, 75%, 80%, 85%, 90%, 95%, 96%, 97%, 98%, 99% or more sequence identity to the amino acid sequence given in SEQ ID NO: 243;
[0446] (iv) a nucleic acid capable of hybridizing under stringent conditions to any one of the nucleic acids given in (i), (ii) or (iii) above.

[0447] According to a further embodiment of the present invention, there is therefore provided an isolated polypeptide comprising:
[0448] (i) a nucleic acid represented by SEQ ID NO: 242;
[0449] (ii) a nucleic acid or fragment thereof that is complementary to SEQ ID NO: 242;
[0450] (iii) a nucleic acid encoding an JMJC polypeptide having, in increasing order of preference, at least 70%, 75%, 80%, 85%, 90%, 95%, 96%, 97%, 98%, 99% or more sequence identity to the amino acid sequence given in SEQ ID NO: 243;
[0451] (iv) a nucleic acid capable of hybridizing under stringent conditions to any one of the nucleic acids given in (i), (ii) or (iii) above.

[0452] Preferably, the polypeptide sequence encoded by the variant nucleic acid sequence obtained by gene shuffling, when used in the construction of a HD phylogenetic tree, such as the one depicted in FIG. 13, clusters with the group of PHDf-HD polypeptides comprising the polypeptide sequence represented by SEQ ID NO: 180 rather than with any other HD group.

[0453] Furthermore, nucleic acid sequence variants may also be obtained by site-directed mutagenesis. Several methods are available to achieve site-directed mutagenesis, the most common being PCR based methods (Current Protocols in Molecular Biology. Wiley Eds.).

[0454] Nucleic acid sequences encoding PHDf-HD polypeptides may be derived from any natural or artificial source. The nucleic acid sequence may be modified from its native form in composition and/or genomic environment through deliberate human manipulation. Preferably the PHDf-HD polypeptide-encoding nucleic acid sequence is from a plant, further preferably from a monocotyledonous plant, more preferably from the family Poaceae, most preferably the nucleic acid sequence is from Oryza sativa.

[0455] Performance of the methods of the invention gives plants having enhanced yield-related traits. In particular performance of the methods of the invention gives plants having increased yield, especially increased seed yield relative to control plants. The terms “yield” and “seed yield” are described in more detail in the “definitions” section herein.

[0456] Reference herein to enhanced yield-related traits is taken to mean an increase in biomass (weight) of one or more parts of a plant, which may include aboveground (harvestable) parts and/or (harvestable) parts below ground. In particular, such harvestable parts are seeds, and performance of the methods of the invention results in plants having increased seed yield relative to the seed yield of control plants.

[0457] Taking corn as an example, a yield increase may be manifested as one or more of the following: increase in the number of plants established per hectare or acre, an increase in the number of ears per plant, an increase in the number of rows, number of kernels per row, kernel weight, thousand kernel weight, ear length/diameter, increase in the seed filling rate (which is the number of filled seeds divided by the total number of seeds and multiplied by 100), among others. Taking rice as an example, a yield increase may manifest itself as an increase in one or more of the following: number of plants per hectare or acre, number of panicles per plant, number of spikelets per panicle, number of flowers (florets) per panicle (which is expressed as a ratio of the number of filled seeds over the number of primary panicles), increase in the seed filling rate (which is the number of filled seeds divided by the total number of seeds and multiplied by 100), increase in thousand kernel weight, among others.

[0458] The present invention provides a method for increasing yield, especially seed yield of plants, relative to control plants, which method comprises modulating, preferably increasing, expression in a plant of a nucleic acid sequence encoding a PHDf-HD polypeptide as defined herein.

[0459] Since the transgenic plants according to the present invention have enhanced yield-related traits, preferably enhanced seed yield-related traits, it is likely that these plants exhibit an increased growth rate (during at least part of their life cycle), relative to the growth rate of control plants at a corresponding stage in their life cycle.

[0460] The increased growth rate may be specific to one or more parts of a plant (including seeds), or may be throughout substantially the whole plant. Plants having an increased growth rate may have a shorter life cycle. The life cycle of a plant may be taken to mean the time needed to grow from a dry mature seed up to the stage where the plant has produced dry mature seeds, similar to the starting material. This life cycle may be influenced by factors such as early vigour, growth rate, greenness index, flowering time and speed of seed maturation. The increase in growth rate may take place at one or more stages in the life cycle of a plant or during substantially the whole plant life cycle. Increased growth rate during the early stages in the life cycle of a plant may reflect enhanced (early) vigour. The increase in growth rate may alter the harvest cycle of a plant allowing plants to be sown later and/or harvested sooner than would otherwise be possible (a similar effect may be obtained with earlier flowering time). If the growth rate is sufficiently increased, it may allow for the further sowing of seeds of the same plant species (for example sowing and harvesting of rice plants followed by sowing and harvesting of further rice plants all within one conventional growing period). Similarly, if the growth rate is sufficiently increased, it may allow for the further sowing of seeds of different plants species (for example the sowing and harvesting of corn plants followed by, for example, the sowing and optional harvesting of soybean, potato or any other suitable plant). Harvesting additional times from the same rootstock in the case of some crop plants may also be possible. Altering the harvest cycle of a plant may lead to an increase in annual biomass production per acre (due to an increase in the number of times (say in a year) that any particular plant may be grown and harvested). An increase in growth rate may also allow for the cultivation of transgenic plants in a wider geographical area than their wild-type counterparts, since the territorial limitations for growing a crop are often determined by adverse environmental conditions either at the time of planting (early season) or at the time of harvesting (late season). Such adverse conditions may be avoided if the harvest cycle is shortened. The growth rate may be determined by deriving various parameters from growth curves, such parameters may be: T-Mid (the time taken for plants to reach 50% of their maximal size) and 1-90 (time taken for plants to reach 90% of their maximal size), amongst others. The growth rate as defined herein is not taken to mean earlier flowering.

[0461] According to a preferred feature of the present invention, performance of the methods of the invention gives plants having an increased growth rate relative to control plants. Therefore, according to the present invention, there is provided a method for increasing the growth rate of plants, which method comprises modulating, preferably increasing, expression in a plant of a nucleic acid sequence encoding a PHDf-HD polypeptide as defined herein.

[0462] Enhanced yield-related traits, preferably enhanced seed yield-related traits, occur whether the plant is under non-stress conditions or whether the plant is exposed to various stresses compared to control plants grown under comparable conditions. Plants typically respond to exposure to stress by growing more slowly. In conditions of severe stress, the plant may even stop growing altogether. Mild stress on the other hand is defined herein as being any stress to which a plant is exposed which does not result in the plant ceasing to grow altogether without the capacity to resume growth. Mild stress in the sense of the invention leads to a reduction in the growth of the stressed plants of less than 40%, 35% or 30%, preferably less than 25%, 20% or 15%, more preferably less than 14%, 13%, 12%, 11% or 10% or less in comparison to the control plant under non-stress conditions. Due to advances in agricultural practices (irrigation, fertilization, pesticide treatments) severe stresses are not often encountered in cultivated crop plants. As a consequence, the compromised growth induced by mild stress is often an undesirable feature for agriculture. Mild stresses are the everyday biotic and/or abiotic (environmental) stresses to which a plant is exposed. Abiotic stresses may be due to drought or excess water, anaerobic stress, salt stress, chemical toxicity, oxidative stress and hot, cold or freezing temperatures. The abiotic stress may be an osmotic stress caused by a water stress (particularly due to drought), salt stress, oxidative stress or an ionic stress. Biotic stresses are typically those stresses caused by pathogens, such as bacteria, viruses, fungi, nematodes, and insects. The term “non-stress” conditions as used herein are those environmental conditions that allow optimal growth of plants. Persons skilled in the art are aware of normal soil conditions and climatic conditions for a given location.

[0463] Performance of the methods of the invention gives plants grown under non-stress conditions or under mild drought conditions having enhanced yield-related traits, preferably enhanced seed yield-related traits, relative to control plants grown under comparable conditions. Therefore, according to the present invention, there is provided a method for enhancing yield-related traits in plants grown under non-stress conditions or under mild drought conditions, which method comprises modulating, preferably increasing, expression in a plant of a nucleic acid sequence encoding a PHDf-HD polypeptide. Plants with optimal growth conditions, cultivated under non-stress conditions, typically yield in increasing order of preference at least 90%, 87%, 85%, 83%, 80%, 77% or 75% of the average production of such plant in a given environment. Average production may be calculated on harvest and/or season basis on a given location. Persons skilled in the art are aware of average yield productions of a crop.

[0464] Performance of the methods according to the present invention results in plants grown under abiotic stress conditions having enhanced yield-related traits, preferably enhanced seed yield-related traits, relative to control plants grown under comparable stress conditions. As reported in Wang at al (Planta (2003) 218: 1-14), abiotic stress leads to a series of morphological, physiological, biochemical and molecular changes that adversely affect plant growth and productivity. Drought, salinity, extreme temperatures and oxidative stress are known to be interconnected and may induce growth and cellular damage through similar mechanisms. Rabbani at al. (Plant Physiol (2003) 133: 1755-1767) describes a particularly high degree of “cross talk” between drought stress and high-salinity stress. For example, drought and/or salinisation are manifested primarily as osmotic stress, resulting in the disruption of homeostasis and ion distribution in the cell. Oxidative stress, which frequently accompanies high or low temperature, salinity or drought stress, may cause denaturing of functional and structural proteins. As a consequence, these diverse environmental stresses often activate similar cell signalling pathways and cellular responses, such as the production of stress proteins, up-regulation of anti-oxidants, accumulation of compatible solutes and growth arrest. Since diverse environmental stresses activate similar pathways, the exemplification of the present invention with drought stress should not be seen as a limitation to drought stress, but more as a screen to indicate the involvement of PHDf-HD polypeptides as defined above, in enhancing yield-related traits, preferably enhancing seed yield-related traits, relative to control plants grown in comparable stress conditions, in abiotic stresses in general.

[0465] The term “abiotic stress” as defined herein is taken to mean any one or more of: water stress (due to drought or excess water), anaerobic stress, salt stress, temperature stress (due to hot, cold or freezing temperatures), chemical toxicity stress and oxidative stress. According to one aspect of the invention, the abiotic stress is an osmotic stress, selected from water stress, salt stress, oxidative stress and ionic stress. Preferably, the water stress is drought stress. The term salt stress is not restricted to common salt (NaCl), but may be any stress caused by one or more of: NaCl, KCl, LiCl, MgCl₂, CaCl₂, amongst others.

[0466] Performance of the methods of the invention gives plants having enhanced yield-related traits, preferably enhanced seed yield-related traits, under abiotic stress conditions relative to control plants grown in comparable stress conditions. Therefore, according to the present invention, there is provided a method for enhancing yield-related traits, preferably enhancing seed yield-related traits, in plants grown under abiotic stress conditions, which method comprises modulating, preferably increasing, expression in a plant of a nucleic acid sequence encoding a PHDf-HD polypeptide. According to one aspect of the invention, the abiotic stress is an osmotic stress, selected from one or more of the following: water stress, salt stress, oxidative stress and ionic stress.

[0467] Another example of abiotic environmental stress is the reduced availability of one or more nutrients that need to be assimilated by the plants for growth and development. Because of the strong influence of nutrition utilization efficiency on plant yield and product quality, a huge amount of fertilizer is poured onto fields to optimize plant growth and quality. Productivity of plants ordinarily is limited by three primary nutrients, phosphorous, potassium and nitrogen, which is usually the rate-limiting element in plant growth of these three. Therefore the major nutritional element required for plant growth is nitrogen (N). It is a constituent of numerous important compounds found in living cells, including amino acids, proteins (enzymes), nucleic acids, and chlorophyll. 1.5% to 2% of plant dry matter is nitrogen and approximately 16% of total plant protein. Thus, nitrogen availability is a major limiting factor for crop plant growth and production (Frink et al. (1999) Proc Natl Acad Sci USA 96(4): 1175-1180), and has as well a major impact on protein accumulation and amino acid composition. Therefore, of great interest are crop plants with enhanced yield-related traits, preferably enhanced seed yield-related traits, when grown under nitrogen-limiting conditions.

[0468] Performance of the methods of the invention gives plants grown under conditions of nutrient deficiency, particularly under conditions of nitrogen deficiency, enhanced yield-related traits, preferably enhanced seed yield-related traits, relative to control plants grown under comparable conditions. Therefore, according to the present invention, there is provided a method for enhancing yield-related traits, preferably enhancing seed yield-related traits, in plants grown under conditions of nutrient deficiency, which method comprises modulating, preferably increasing, expression in a plant of a nucleic acid sequence encoding a PHDf-HD polypeptide. Nutrient deficiency may result from a lack or excess of nutrients such as nitrogen, phosphates and other phosphorous-containing compounds, potassium, calcium, cadmium, magnesium, manganese, iron and boron, amongst others.

[0469] The present invention encompasses plants or parts thereof (including seeds) or cells thereof obtainable by the methods according to the present invention. The plants or parts thereof or cells thereof comprise a nucleic acid transgene encoding a PHDf-HD polypeptide as defined above.

[0470] The invention also provides genetic constructs and vectors to facilitate introduction and/or modulated, preferably increased, expression in plants of nucleic acid sequences encoding PHDf-HD polypeptides. The gene constructs may be inserted into vectors, which may be commercially available, suitable for transforming into plants and for expression of the gene of interest in the transformed cells. The invention also provides use of a gene construct as defined herein in the methods of the invention.

[0471] More specifically, the present invention provides a construct comprising:
[0472] (a) a nucleic acid sequence encoding a PHDf-HD polypeptide as defined above;
[0473] (b) one or more control sequences capable of modulating, preferably increasing, expression of the nucleic acid sequence of (a); and optionally
[0474] (c) a transcription termination sequence.

[0475] Preferably, the nucleic acid sequence encoding a PHDf-HD polypeptide is as defined above. The term “control sequence” and “termination sequence” are as defined herein.

[0476] Preferably, one of the control sequences of a construct is a constitutive promoter isolated from a plant genome. An example of a plant constitutive promoter is a GOS2 promoter, preferably a rice GOS2 promoter, more preferably a GOS2 promoter as represented by SEQ ID NO: 235.

[0477] Plants are transformed with a vector comprising any of the nucleic acid sequences described above. The skilled artisan is well aware of the genetic elements that must be present on the vector in order to successfully transform, select and propagate host cells containing the sequence of interest. The sequence of interest is operably linked to one or more control sequences (at least to a promoter).

[0478] Advantageously, any type of promoter, whether natural or synthetic, may be used to modulate, preferably increase, expression of the nucleic acid sequence. A constitutive promoter is particularly useful in the methods, preferably a constitutive promoter isolated from a plant genome. The plant constitutive promoter drives expression of a coding sequence at a level that is in all instances below that obtained under the control of a 35S CaMV promoter.

[0479] Other organ-specific promoters, for example for preferred expression in leaves, stems, tubers, meristems, seeds (embryo and/or endosperm), are useful in performing the methods of the invention. See the “Definitions” section herein for definitions of the various promoter types.

[0480] It should be clear that the applicability of the present invention is not restricted to the PHDf-HD polypeptide-encoding nucleic acid sequence represented by SEQ ID NO: 179, nor is the applicability of the invention restricted to expression of a PHDf-HD polypeptide-encoding nucleic acid sequence when driven by a constitutive promoter.

[0481] Optionally, one or more terminator sequences may be used in the construct introduced into a plant. Additional regulatory elements may include transcriptional as well as translational enhancers. Those skilled in the art will be aware of terminator and enhancer sequences that may be suitable for use in performing the invention. An intron sequence may also be added to the 5′ untranslated region (UTR) or in the coding sequence to increase the amount of the mature message that accumulates in the cytosol, as described in the definitions section. Other control sequences (besides promoter, enhancer, silencer, intron sequences, 3′UTR and/or 5′UTR regions) may be protein and/or RNA stabilizing elements. Such sequences would be known or may readily be obtained by a person skilled in the art.

[0482] The genetic constructs of the invention may further include an origin of replication sequence that is required for maintenance and/or replication in a specific cell type. One example is when a genetic construct is required to be maintained in a bacterial cell as an episomal genetic element (e.g. plasmid or cosmid molecule). Preferred origins of replication include, but are not limited to, the f1-ori and colE1

[0483] For the detection of the successful transfer of the nucleic acid sequences as used in the methods of the invention and/or selection of transgenic plants comprising these nucleic acid sequences, it is advantageous to use marker genes (or reporter genes). Therefore, the genetic construct may optionally comprise a selectable marker gene. Selectable markers are described in more detail in the “definitions” section herein.

[0484] It is known that upon stable or transient integration of nucleic acid sequences into plant cells, only a minority of the cells takes up the foreign DNA and, if desired, integrates it into its genome, depending on the expression vector used and the transfection technique used. To identify and select these integrants, a gene coding for a selectable marker (such as the ones described above) is usually introduced into the host cells together with the gene of interest. These markers can for example be used in mutants in which these genes are not functional by, for example, deletion by conventional methods. Furthermore, nucleic acid sequence molecules encoding a selectable marker can be introduced into a host cell on the same vector that comprises the sequence encoding the polypeptides of the invention or used in the methods of the invention, or else in a separate vector. Cells which have been stably transfected with the introduced nucleic acid sequence can be identified for example by selection (for example, cells which have integrated the selectable marker survive whereas the other cells die). The marker genes may be removed or excised from the transgenic cell once they are no longer needed. Techniques for marker gene removal are known in the art, useful techniques are described above in the definitions section.

[0485] The invention also provides a method for the production of transgenic plants having enhanced yield-related traits, preferably enhanced seed yield-related traits, relative to control plants, comprising introduction and expression in a plant of any nucleic acid sequence encoding a PHDf-HD polypeptide as defined hereinabove.

[0486] More specifically, the present invention provides a method for the production of transgenic plants having enhanced yield-related traits, preferably enhanced seed yield-related traits, relative to control plants, which method comprises:
[0487] (i) introducing and expressing in a plant, plant part, or plant cell a nucleic acid sequence encoding a PHDf-HD polypeptide, under the control of plant constitutive promoter; and
[0488] (ii) cultivating the plant cell under conditions promoting plant growth and development.

[0489] The nucleic acid sequence of (i) may be any of the nucleic acid sequences capable of encoding a PHDf-HD polypeptide as defined herein.

[0490] The nucleic acid sequence may be introduced directly into a plant cell or into the plant itself (including introduction into a tissue, organ or any other part of a plant). According to a preferred feature of the present invention, the nucleic acid sequence is preferably introduced into a plant by transformation. The term “transformation” is described in more detail in the “definitions” section herein.

[0491] The genetically modified plant cells can be regenerated via all methods with which the skilled worker is familiar. Suitable methods can be found in the abovementioned publications by S. D. Kung and R. Wu, Potrykus or Hagen and Willmitzer.

[0492] Generally after transformation, plant cells or cell groupings are selected for the presence of one or more markers which are encoded by plant-expressible genes co-transferred with the gene of interest, following which the transformed material is regenerated into a whole plant. To select transformed plants, the plant material obtained in the transformation is, as a rule, subjected to selective conditions so that transformed plants can be distinguished from untransformed plants. For example, the seeds obtained in the above-described manner can be planted and, after an initial growing period, subjected to a suitable selection by spraying. A further possibility consists in growing the seeds, if appropriate after sterilization, on agar plates using a suitable selection agent so that only the transformed seeds can grow into plants. Alternatively, the transformed plants are screened for the presence of a selectable marker such as the ones described above.

[0493] Following DNA transfer and regeneration, putatively transformed plants may also be evaluated, for instance using Southern analysis, for the presence of the gene of interest, copy number and/or genomic organisation. Alternatively or additionally, expression levels of the newly introduced DNA may be monitored using Northern and/or Western analysis, both techniques being well known to persons having ordinary skill in the art.

[0494] The generated transformed plants may be propagated by a variety of means, such as by clonal propagation or classical breeding techniques. For example, a first generation (or T1) transformed plant may be selfed and homozygous second-generation (or T2) transformants selected, and the T2 plants may then further be propagated through classical breeding techniques. The generated transformed organisms may take a variety of forms. For example, they may be chimeras of transformed cells and non-transformed cells; clonal transformants (e.g., all cells transformed to contain the expression cassette); grafts of transformed and untransformed tissues (e.g., in plants, a transformed rootstock grafted to an untransformed scion).

[0495] The present invention clearly extends to any plant cell or plant produced by any of the methods described herein, and to all plant parts and propagules thereof. The present invention extends further to encompass the progeny of a primary transformed or transfected cell, tissue, organ or whole plant that has been produced by any of the aforementioned methods, the only requirement being that progeny exhibit the same genotypic and/or phenotypic characteristic(s) as those produced by the parent in the methods according to the invention.

[0496] The invention also includes host cells containing an isolated nucleic acid sequence encoding a PHDf-HD polypeptide as defined hereinabove, operably linked to a plant constitutive promoter. Preferred host cells according to the invention are plant cells. Host plants for the nucleic acid sequences or the vector used in the method according to the invention, the expression cassette or construct or vector are, in principle, advantageously all plants, which are capable of synthesizing the polypeptides used in the inventive method.

[0497] The methods of the invention are advantageously applicable to any plant. Plants that are particularly useful in the methods of the invention include all plants, which belong to the superfamily Viridiplantae, in particular monocotyledonous and dicotyledonous plants including fodder or forage legumes, ornamental plants, food crops, trees or shrubs. According to a preferred embodiment of the present invention, the plant is a crop plant. Examples of crop plants include soybean, sunflower, canola, alfalfa, rapeseed, cotton, tomato, potato and tobacco. Further preferably, the plant is a monocotyledonous plant. Examples of monocotyledonous plants include sugarcane. More preferably the plant is a cereal. Examples of cereals include rice, maize, wheat, barley, millet, rye, triticale, sorghum and oats.

[0498] The invention also extends to harvestable parts of a plant comprising an isolated nucleic acid sequence encoding a PHDf-HD (as defined hereinabove) operably linked to a plant constitutive promoter, such as, but not limited to seeds, leaves, fruits, flowers, stems, rhizomes, tubers and bulbs. The invention furthermore relates to products derived, preferably directly derived, from a harvestable part of such a plant, such as dry pellets or powders, oil, fat and fatty acids, starch or proteins.

[0499] According to a preferred feature of the invention, the modulated expression is increased expression. Methods for increasing expression of nucleic acid sequences or genes, or gene products, are well documented in the art and examples are provided in the definitions section.

[0500] As mentioned above, a preferred method for modulating, preferably increasing, expression of a nucleic acid sequence encoding a PHDf-HD polypeptide is by introducing and expressing in a plant a nucleic acid sequence encoding a PHDf-HD polypeptide; however the effects of performing the method, i.e. enhancing yield-related traits, may also be achieved using other well known techniques, including but not limited to T-DNA activation tagging, TILLING, homologous recombination. A description of these techniques is provided in the definitions section.

[0501] The present invention also encompasses use of nucleic acid sequences encoding PHDf-HD polypeptides as described herein and use of these PHDf-HD polypeptides in enhancing any of the aforementioned yield-related traits, preferably seed yield-related traits, in plants.

[0502] Nucleic acid sequences encoding PHDf-HD polypeptide described herein, or the PHDf-HD polypeptides themselves, may find use in breeding programmes in which a DNA marker is identified that may be genetically linked to a PHDf-HD polypeptide-encoding gene. The genes/nucleic acid sequences, or the PHDf-HD polypeptides themselves may be used to define a molecular marker. This DNA or protein marker may then be used in breeding programmes to select plants having enhanced yield-related traits, preferably enhanced seed yield-related traits, as defined hereinabove in the methods of the invention.

[0503] Allelic variants of a gene/nucleic acid sequence encoding a PHDf-HD polypeptide may also find use in marker-assisted breeding programmes. Such breeding programmes sometimes require introduction of allelic variation by mutagenic treatment of the plants, using for example EMS mutagenesis; alternatively, the programme may start with a collection of allelic variants of so called “natural” origin caused unintentionally. Identification of allelic variants then takes place, for example, by PCR. This is followed by a step for selection of superior allelic variants of the sequence in question and which give enhanced yield-related traits. Selection is typically carried out by monitoring growth performance of plants containing different allelic variants of the sequence in question. Growth performance may be monitored in a greenhouse or in the field. Further optional steps include crossing plants in which the superior allelic variant was identified with another plant. This could be used, for example, to make a combination of interesting phenotypic features.

[0504] Nucleic acid sequences encoding PHDf-HD polypeptides may also be used as probes for genetically and physically mapping the genes that they are a part of, and as markers for traits linked to those genes. Such information may be useful in plant breeding in order to develop lines with desired phenotypes. Such use of nucleic acid sequences encoding a PHDf-HD polypeptide requires only a nucleic acid sequence of at least 15 nucleotides in length. The nucleic acid sequences encoding a PHDf-HD polypeptide may be used as restriction fragment length polymorphism (RFLP) markers. Southern blots (Sambrook J, Fritsch E F and Maniatis T (1989) Molecular Cloning, A Laboratory Manual) of restriction-digested plant genomic DNA may be probed with the nucleic acid sequences encoding a PHDf-HD polypeptide. The resulting banding patterns may then be subjected to genetic analyses using computer programs such as MapMaker (Lander et al. (1987) Genomics 1: 174-181) in order to construct a genetic map. In addition, the nucleic acid sequences may be used to probe Southern blots containing restriction endonuclease-treated genomic DNAs of a set of individuals representing parent and progeny of a defined genetic cross. Segregation of the DNA polymorphisms is noted and used to calculate the position of the nucleic acid sequence encoding a PHDf-HD polypeptide in the genetic map previously obtained using this population (Botstein et al. (1980) Am. J. Hum. Genet. 32: 314-331).

[0505] The production and use of plant gene-derived probes for use in genetic mapping is described in Bernatzky and Tanksley (1986) Plant Mal. Biol. Reporter 4: 37-41. Numerous publications describe genetic mapping of specific cDNA clones using the methodology outlined above or variations thereof. For example, F2 intercross populations, backcross populations, randomly mated populations, near isogenic lines, and other sets of individuals may be used for mapping. Such methodologies are well known to those skilled in the art.

[0506] The nucleic acid sequence probes may also be used for physical mapping (i.e., placement of sequences on physical maps; see Hoheisel et al. In: Non-mammalian Genomic Analysis: A Practical Guide, Academic press 1996, pp. 319-346, and references cited therein).

[0507] In another embodiment, the nucleic acid sequence probes may be used in direct fluorescence in situ hybridisation (FISH) mapping (Trask (1991) Trends Genet. 7:149-154). Although current methods of FISH mapping favour use of large clones (several kb to several hundred kb; see Laan et al. (1995) Genome Res. 5:13-20), improvements in sensitivity may allow performance of FISH mapping using shorter probes.

[0508] A variety of nucleic acid sequence amplification-based methods for genetic and physical mapping may be carried out using the nucleic acid sequences. Examples include allele-specific amplification (Kazazian (1989) J. Lab. Clin. Med. 11:95-96), polymorphism of PCR-amplified fragments (CAPS; Sheffield et al. (1993) Genomics 16:325-332), allele-specific ligation (Landegren et al. (1988) Science 241:1077-1080), nucleotide extension reactions (Sokolov (1990) Nucleic acid sequence Res. 18:3671), Radiation Hybrid Mapping (Walter et al. (1997) Nat. Genet. 7:22-28) and Happy Mapping (Dear and Cook (1989) Nucleic acid sequence Res. 17:6795-6807). For these methods, the sequence of a nucleic acid sequence is used to design and produce primer pairs for use in the amplification reaction or in primer extension reactions. The design of such primers is well known to those skilled in the art. In methods employing PCR-based genetic mapping, it may be necessary to identify DNA sequence differences between the parents of the mapping cross in the region corresponding to the instant nucleic acid sequence. This, however, is generally not necessary for mapping methods.

[0509] The methods according to the present invention result in plants having enhanced yield-related traits, preferably enhanced seed yield-related traits, as described hereinbefore. These traits may also be combined with other economically advantageous traits, such as further yield-enhancing traits, tolerance to other abiotic and biotic stresses, traits modifying various architectural features and/or biochemical and/or physiological features.

### V. bHLH11-Like (Basic Helix-Loop-Helix 11)

[0510] Surprisingly, it has now been found that modulating expression in a plant of a nucleic acid encoding a bHLH11-like polypeptide gives plants having enhanced yield-related traits relative to control plants. According to a first embodiment, the present invention provides a method for enhancing yield-related traits in plants relative to control plants, comprising modulating expression in a plant of a nucleic acid encoding a bHLH11-like polypeptide.

[0511] A preferred method for modulating (preferably, increasing) expression of a nucleic acid encoding a bHLH11-like polypeptide is by introducing and expressing in a plant a nucleic acid encoding a bHLH11-like polypeptide.

[0512] Any reference hereinafter to a “protein useful in the methods of the invention” is taken to mean a bHLH11-like polypeptide as defined herein. Any reference hereinafter to a “nucleic acid useful in the methods of the invention” is taken to mean a nucleic acid capable of encoding such a bHLH11-like polypeptide. The nucleic acid to be introduced into a plant (and therefore useful in performing the methods of the invention) is any nucleic acid encoding the type of protein which will now be described, hereafter also named “bHLH11-like nucleic acid” or “bHLH11-like gene”.

[0513] A “bHLH11-like polypeptide” as defined herein refers to any polypeptide comprising a basic domain followed by a HLH domain (HMMPFam PF00010, ProfileScan PS50888, SMART SM00353) thereby forming a basic helix-loop-helix domain (bHLH) (Interpro IPR001092). Preferably, the bHLH11-like polypeptide comprises at least one, preferably two, more preferably three, most preferably four or more of the following motifs:

### Motif 1 (SEQ ID NO: 246): (E/D)(D/S/E)(F/M)(L/F)(D/E/Q/L)(Q/H/E)

### Motif 2 (SEQ ID NO: 247): RA(R/I/Q)RG(Q/H)ATDPHSIAER

### Motif 3 (SEQ ID NO: 248): (M/IN/L)(K/R)(A/S/Q/D/N)LQ(E/DA)LVP

### Motif 4 (SEQ ID NO: 249): (M/I)(UI)DEI(IN/L)(D/E/G)Y(V/UI)(K/R)FL(Q/R)LQ(V/I)K

### Motif 5 (SEQ ID NO: 250): (V/I)LSMSR(UV)G

### Motif 6 (SEQ ID NO: 251): V(AN/L/I)(K/R)(L/M)(M/L)(E/D)(E/D/S/K/T)(D/N/S)(MN/I)(G/T/I)XAMQ(Y/L/F)L

[0514] wherein X can be any amino acid, but preferably one of S, T, A, M, K, N

### Motif 7 (SEQ ID NO: 252): (M/V)(P/S)(I/V)(S/T/A)LA

[0515] Alternatively, the homologue of a bHLH11-like protein has in increasing order of preference at least 25%, 26%, 27%, 28%, 29%, 30%, 31%, 32%, 33%, 34%, 35%, 36%, 37%, 38%, 39%, 40%, 41%, 42%, 43%, 44%, 45%, 46%, 47%, 48%, 49%, 50%, 51%, 52%, 53%, 54%, 55%, 56%, 57%, 58%, 59%, 60%, 61%, 62%, 63%, 64%, 65%, 66%, 67%, 68%, 69%, 70%, 71%, 72%, 73%, 74%, 75%, 76%, 77%, 78%, 79%, 80%, 81%, 82%, 83%, 84%, 85%, 86%, 87%, 88%, 89%, 90%, 91%, 92%, 93%, 94%, 95%, 96%, 97%, 98%, or 99% overall sequence identity to the amino acid represented by SEQ ID NO: 245, provided that the homologous protein comprises the conserved motifs as outlined above. The overall sequence identity is determined using a global alignment algorithm, such as the Needleman Wunsch algorithm in the program GAP (GCG Wisconsin Package, Accelrys), preferably with default parameters. Compared to overall sequence identity, the sequence identity will generally be higher when only conserved domains or motifs are considered. The sequence conservation is much higher in the region of the bHLH domain (see Table E3 in Example 45 and FIG. 21). Therefore the bHLH domain is a good criterion for the defining the group of bHLH11-like proteins. Preferably, the bHLH11-like polypeptide comprises the sequence of Motif 8 (SEQ ID NO: 253): SIAERLRRERIAERMRALQELVPNTNKTDRAVMLDEILDYVKFLRLQVKVL,

or a sequence that has, in increasing order of preference, at least 75%, 76%, 77%, 78%, 79%, 80%, 81%, 82%, 83%, 84%, 85%, 86%, 87%, 88%, 89%, 90%, 91%, 92%, 93%, 94%, 95%, 96%, 97%, 98%, or 99% sequence identity to SEQ ID NO: 253. The HLH domain as determined by SMART spans residue 132 to 181 in SEQ ID NO: 245 and is comprised in Motif 8.

[0516] Preferably, the polypeptide sequence which when used in the construction of a phylogenetic tree, such as the one depicted in FIG. 22, clusters within the group of bHLH11-like proteins, rather than with other bHLH proteins. Similarly, the bHLH11-like protein of choice will cluster within subgroup C when a tree is constructed according to FIG. 6 in Li et al. (2006), rather than with any other group.

[0517] The terms “domain”, “signature” and “motif” are defined in the “definitions” section herein. Specialist databases exist for the identification of domains, for example, SMART (Schultz et al. (1998) Proc. Natl. Acad. Sci. USA 95, 5857-5864; Letunic et al. (2002) Nucleic Acids Res 30, 242-244), InterPro (Mulder et al., (2003) Nucl. Acids. Res. 31, 315-318), Prosite (Bucher and Bairoch (1994), A generalized profile syntax for biomolecular sequences motifs and its function in automatic sequence interpretation. (In) ISMB-94; Proceedings 2nd International Conference on Intelligent Systems for Molecular Biology. Altman R., Brutlag D., Karp P., Lathrop R., Searls D., Eds., pp 53-61, AAAI Press, Menlo Park; Hulo et al., Nucl. Acids. Res. 32:D134-D137, (2004)), or Pfam (Bateman et al., Nucleic Acids Research 30(1): 276-280 (2002)). A set of tools for in silico analysis of protein sequences is available on the ExPASy proteomics server (Swiss Institute of Bioinformatics (Gasteiger et al., ExPASy: the proteomics server for in-depth protein knowledge and analysis, Nucleic Acids Res. 31:3784-3788 (2003)). Domains or motifs may also be identified using routine techniques, such as by sequence alignment.

[0518] Methods for the alignment of sequences for comparison are well known in the art, such methods include GAP, BESTFIT, BLAST, FASTA and TFASTA. GAP uses the algorithm of Needleman and Wunsch ((1970) J Mol Biol 48: 443-453) to find the global (i.e. spanning the complete sequences) alignment of two sequences that maximizes the number of matches and minimizes the number of gaps. The BLAST algorithm (Altschul et al. (1990) J Mol Biol 215: 403-10) calculates percent sequence identity and performs a statistical analysis of the similarity between the two sequences. The software for performing BLAST analysis is publicly available through the National Centre for Biotechnology Information (NCBI). Homologues may readily be identified using, for example, the ClustalW multiple sequence alignment algorithm (version 1.83), with the default pairwise alignment parameters, and a scoring method in percentage. Global percentages of similarity and identity may also be determined using one of the methods available in the MatGAT software package (Campanella et al., BMC Bioinformatics. 2003 Jul. 10; 4:29. MatGAT: an application that generates similarity/identity matrices using protein or DNA sequences.). Minor manual editing may be performed to optimise alignment between conserved motifs, as would be apparent to a person skilled in the art. Furthermore, instead of using full-length sequences for the identification of homologues, specific domains may also be used. The sequence identity values may be determined over the entire nucleic acid or amino acid sequence or over selected domains or conserved motif(s), using the programs mentioned above using the default parameters. For local alignments, the Smith-Waterman algorithm is particularly useful (Smith T F, Waterman M S (1981) J. Mol. Biol. 147(1); 195-7).

[0519] Furthermore, bHLH11-like polypeptides (at least in their native form) typically have DNA binding activity. Tools and techniques for measuring DNA binding activity are well known in the art. In addition, as shown in the present invention, a bHLH11-like protein, such as SEQ ID NO: 245, when overexpressed in rice, gives plants having enhanced yield-related traits, in particular increased fill rate. Further details are provided in Examples section.

[0520] The present invention is illustrated by transforming plants with the nucleic acid sequence represented by SEQ ID NO: 244, encoding the polypeptide sequence of SEQ ID NO: 245. However, performance of the invention is not restricted to these sequences; the methods of the invention may advantageously be performed using any bHLH11-like-encoding nucleic acid or bHLH11-like polypeptide as defined herein.

[0521] Examples of nucleic acids encoding bHLH11-like polypeptides are given in Table E1 of Example 43 herein. Such nucleic acids are useful in performing the methods of the invention. The amino acid sequences given in Table E1 of Example 43 are example sequences of orthologues and paralogues of the bHLH11-like polypeptide represented by SEQ ID NO: 245, the terms “orthologues” and “paralogues” being as defined herein. Further orthologues and paralogues may readily be identified by performing a so-called reciprocal blast search. Typically, this involves a first BLAST involving BLASTing a query sequence (for example using any of the sequences listed in Table E1 of Example 43) against any sequence database, such as the publicly available NCBI database. BLASTN or TBLASTX (using standard default values) are generally used when starting from a nucleotide sequence, and BLASTP or TBLASTN (using standard default values) when starting from a protein sequence. The BLAST results may optionally be filtered. The full-length sequences of either the filtered results or non-filtered results are then BLASTed back (second BLAST) against sequences from the organism from which the query sequence is derived (where the query sequence is SEQ ID NO: 244 or SEQ ID NO: 245, the second BLAST would therefore be against Triticum aestivum sequences). The results of the first and second BLASTs are then compared. A paralogue is identified if a high-ranking hit from the first blast is from the same species as from which the query sequence is derived, a BLAST back then ideally results in the query sequence amongst the highest hits; an orthologue is identified if a high-ranking hit in the first BLAST is not from the same species as from which the query sequence is derived, and preferably results upon BLAST back in the query sequence being among the highest hits.

[0522] High-ranking hits are those having a low E-value. The lower the E-value, the more significant the score (or in other words the lower the chance that the hit was found by chance). Computation of the E-value is well known in the art. In addition to E-values, comparisons are also scored by percentage identity. Percentage identity refers to the number of identical nucleotides (or amino acids) between the two compared nucleic acid (or polypeptide) sequences over a particular length. In the case of large families, ClustalW may be used, followed by a neighbour joining tree, to help visualize clustering of related genes and to identify orthologues and paralogues.

[0523] Nucleic acid variants may also be useful in practising the methods of the invention. Examples of such variants include nucleic acids encoding homologues and derivatives of any one of the amino acid sequences given in Table E1 of Example 43, the terms “homologue” and “derivative” being as defined herein. Also useful in the methods of the invention are nucleic acids encoding homologues and derivatives of orthologues or paralogues of any one of the amino acid sequences given in Table E1 of Example 43. Homologues and derivatives useful in the methods of the present invention have substantially the same biological and functional activity as the unmodified protein from which they are derived.

[0524] Further nucleic acid variants useful in practising the methods of the invention include portions of nucleic acids encoding bHLH11-like polypeptides, nucleic acids hybridising to nucleic acids encoding bHLH11-like polypeptides, splice variants of nucleic acids encoding bHLH11-like polypeptides, allelic variants of nucleic acids encoding bHLH11-like polypeptides and variants of nucleic acids encoding bHLH11-like polypeptides obtained by gene shuffling. The terms hybridising sequence, splice variant, allelic variant and gene shuffling are as described herein.

[0525] Nucleic acids encoding bHLH11-like polypeptides need not be full-length nucleic acids, since performance of the methods of the invention does not rely on the use of full-length nucleic acid sequences. According to the present invention, there is provided a method for enhancing yield-related traits in plants, comprising introducing and expressing in a plant a portion of any one of the nucleic acid sequences given in Table E1 of Example 43, or a portion of a nucleic acid encoding an orthologue, paralogue or homologue of any of the amino acid sequences given in Table E1 of Example 43.

[0526] A portion of a nucleic acid may be prepared, for example, by making one or more deletions to the nucleic acid. The portions may be used in isolated form or they may be fused to other coding (or non-coding) sequences in order to, for example, produce a protein that combines several activities. When fused to other coding sequences, the resultant polypeptide produced upon translation may be bigger than that predicted for the protein portion.

[0527] Portions useful in the methods of the invention, encode a bHLH11-like polypeptide as defined herein, and have substantially the same biological activity as the amino acid sequences given in Table E1 of Example 43. Preferably, the portion is a portion of any one of the nucleic acids given in Table E1 of Example 43, or is a portion of a nucleic acid encoding an orthologue or paralogue of any one of the amino acid sequences given in Table E1 of Example 43. Preferably the portion is at least 500, 550, 600, 650, 700, 750, 800, 850, 900, 950, 1000, 1100, 1200, 1300, 1400, 1500, 1600, 1700, 1800, 1900, 2000, 2100, 2200, 2300, 2400, 2500 consecutive nucleotides in length, the consecutive nucleotides being of any one of the nucleic acid sequences given in Table E1 of Example 43, or of a nucleic acid encoding an orthologue or paralogue of any one of the amino acid sequences given in Table E1 of Example 43. Most preferably the portion is a portion of the nucleic acid of SEQ ID NO: 244. Preferably, the portion encodes a fragment of an amino acid sequence which, when used in the construction of a phylogenetic tree, such as the one depicted in FIG. 22, clusters within the group of bHLH11-like proteins, rather than with other bHLH proteins. Similarly, the bHLH11-like protein of choice will cluster within subgroup C when a tree is constructed according to FIG. 6 in Li et al. (2006), rather than with any other group.

[0528] Another nucleic acid variant useful in the methods of the invention is a nucleic acid capable of hybridising, under reduced stringency conditions, preferably under stringent conditions, with a nucleic acid encoding a bHLH11-like polypeptide as defined herein, or with a portion as defined herein.

[0529] According to the present invention, there is provided a method for enhancing yield-related traits in plants, comprising introducing and expressing in a plant a nucleic acid capable of hybridizing to any one of the nucleic acids given in Table E1 of Example 43, or comprising introducing and expressing in a plant a nucleic acid capable of hybridising to a nucleic acid encoding an orthologue, paralogue or homologue of any of the nucleic acid sequences given in Table E1 of Example 43.

[0530] Hybridising sequences useful in the methods of the invention encode a bHLH11-like polypeptide as defined herein, having substantially the same biological activity as the amino acid sequences given in Table E1 of Example 43. Preferably, the hybridising sequence is capable of hybridising to the complement of any one of the nucleic acids given in Table E1 of Example 43, or to a portion of any of these sequences, a portion being as defined above, or the hybridising sequence is capable of hybridising to the complement of a nucleic acid encoding an orthologue or paralogue of any one of the amino acid sequences given in Table E1 of Example 43. Most preferably, the hybridising sequence is capable of hybridising to the complement of a nucleic acid as represented by SEQ ID NO: 244 or to a portion thereof.

[0531] Preferably, the hybridising sequence encodes a polypeptide with an amino acid sequence which, when full-length and used in the construction of a phylogenetic tree, such as the one depicted in FIG. 22, clusters within the group of bHLH11-like proteins, rather than with other bHLH proteins. Similarly, the bHLH11-like protein of choice will cluster within subgroup C when a tree is constructed according to FIG. 6 in Li et al. (2006), rather than with any other group.

[0532] Another nucleic acid variant useful in the methods of the invention is a splice variant encoding a bHLH11-like polypeptide as defined hereinabove, a splice variant being as defined herein.

[0533] According to the present invention, there is provided a method for enhancing yield-related traits in plants, comprising introducing and expressing in a plant a splice variant of any one of the nucleic acid sequences given in Table E1 of Example 43, or a splice variant of a nucleic acid encoding an orthologue, paralogue or homologue of any of the amino acid sequences given in Table E1 of Example 43.

[0534] Preferred splice variants are splice variants of a nucleic acid represented by SEQ ID NO: 244, or a splice variant of a nucleic acid encoding an orthologue or paralogue of SEQ ID NO: 245. Preferably, the amino acid sequence encoded by the splice variant, when used in the construction of a phylogenetic tree, such as the one depicted in FIG. 22, clusters within the group of bHLH11-like proteins, rather than with other bHLH proteins. Similarly, the bHLH11-like protein of choice will cluster within subgroup C when a tree is constructed according to FIG. 6 in Li et al. (2006), rather than with any other group.

[0535] Another nucleic acid variant useful in performing the methods of the invention is an allelic variant of a nucleic acid encoding a bHLH11-like polypeptide as defined hereinabove, an allelic variant being as defined herein.

[0536] According to the present invention, there is provided a method for enhancing yield-related traits in plants, comprising introducing and expressing in a plant an allelic variant of any one of the nucleic acids given in Table E1 of Example 43, or comprising introducing and expressing in a plant an allelic variant of a nucleic acid encoding an orthologue, paralogue or homologue of any of the amino acid sequences given in Table E1 of Example 43.

[0537] The polypeptides encoded by allelic variants useful in the methods of the present invention have substantially the same biological activity as the bHLH11-like polypeptide of SEQ ID NO: 244 and any of the amino acids depicted in Table E1 of Example 43. Allelic variants exist in nature, and encompassed within the methods of the present invention is the use of these natural alleles. Preferably, the allelic variant is an allelic variant of SEQ ID NO: 244 or an allelic variant of a nucleic acid encoding an orthologue or paralogue of SEQ ID NO: 245. Preferably, the amino acid sequence encoded by the allelic variant, when used in the construction of a phylogenetic tree, such as the one depicted in FIG. 22, clusters within the group of bHLH11-like proteins, rather than with other bHLH proteins. Similarly, the bHLH11-like protein of choice will cluster within subgroup C when a tree is constructed according to FIG. 6 in Li et al. (2006), rather than with any other group.

[0538] Gene shuffling or directed evolution may also be used to generate variants of nucleic acids encoding bHLH11-like polypeptides as defined above; the term “gene shuffling” being as defined herein.

[0539] According to the present invention, there is provided a method for enhancing yield-related traits in plants, comprising introducing and expressing in a plant a variant of any one of the nucleic acid sequences given in Table E1 of Example 43, or comprising introducing and expressing in a plant a variant of a nucleic acid encoding an orthologue, paralogue or homologue of any of the amino acid sequences given in Table E1 of Example 43, which variant nucleic acid is obtained by gene shuffling.

[0540] Preferably, the amino acid sequence encoded by the variant nucleic acid obtained by gene shuffling, when used in the construction of a phylogenetic tree, such as the one depicted in FIG. 22, clusters within the group of bHLH11-like proteins, rather than with other bHLH proteins. Similarly, the bHLH11-like protein of choice will cluster within subgroup C when a tree is constructed according to FIG. 6 in Li et al. (2006), rather than with any other group.

[0541] Furthermore, nucleic acid variants may also be obtained by site-directed mutagenesis. Several methods are available to achieve site-directed mutagenesis, the most common being PCR based methods (Current Protocols in Molecular Biology. Wiley Eds.).

[0542] Nucleic acids encoding bHLH11-like polypeptides may be derived from any natural or artificial source. The nucleic acid may be modified from its native form in composition and/or genomic environment through deliberate human manipulation. Preferably the bHLH11-like polypeptide-encoding nucleic acid is from a plant, further preferably from a monocotyledonous plant, more preferably from the family Poaceae, most preferably the nucleic acid is from Triticum aestivurn.

[0543] Performance of the methods of the invention gives plants having enhanced yield-related traits. In particular performance of the methods of the invention gives plants having increased yield, especially increased seed yield relative to control plants. The terms “yield” and “seed yield” are described in more detail in the “definitions” section herein.

[0544] Reference herein to enhanced yield-related traits is taken to mean an increase in biomass (weight) of one or more parts of a plant, which may include aboveground (harvestable) parts and/or (harvestable) parts below ground. In particular, such harvestable parts are seeds, and performance of the methods of the invention results in plants having increased seed yield relative to the seed yield of control plants.

[0545] Taking corn as an example, a yield increase may be manifested as one or more of the following: increase in the number of plants established per square meter, an increase in the number of ears per plant, an increase in the number of rows, number of kernels per row, kernel weight, thousand kernel weight, ear length/diameter, increase in the seed filling rate (which is the number of filled seeds divided by the total number of seeds and multiplied by 100), among others. Taking rice as an example, a yield increase may manifest itself as an increase in one or more of the following: number of plants per square meter, number of panicles per plant, number of spikelets per panicle, number of flowers (florets) per panicle (which is expressed as a ratio of the number of filled seeds over the number of primary panicles), increase in the seed filling rate (which is the number of filled seeds divided by the total number of seeds and multiplied by 100), increase in thousand kernel weight, among others.

[0546] The present invention provides a method for increasing yield, especially seed yield of plants, relative to control plants, which method comprises modulating expression in a plant of a nucleic acid encoding a bHLH11-like polypeptide as defined herein.

[0547] Since the transgenic plants according to the present invention have increased yield, it is likely that these plants exhibit an increased growth rate (during at least part of their life cycle), relative to the growth rate of control plants at a corresponding stage in their life cycle.

[0548] The increased growth rate may be specific to one or more parts of a plant (including seeds), or may be throughout substantially the whole plant. Plants having an increased growth rate may have a shorter life cycle. The life cycle of a plant may be taken to mean the time needed to grow from a dry mature seed up to the stage where the plant has produced dry mature seeds, similar to the starting material. This life cycle may be influenced by factors such as early vigour, growth rate, greenness index, flowering time and speed of seed maturation. The increase in growth rate may take place at one or more stages in the life cycle of a plant or during substantially the whole plant life cycle. Increased growth rate during the early stages in the life cycle of a plant may reflect enhanced vigour. The increase in growth rate may alter the harvest cycle of a plant allowing plants to be sown later and/or harvested sooner than would otherwise be possible (a similar effect may be obtained with earlier flowering time). If the growth rate is sufficiently increased, it may allow for the further sowing of seeds of the same plant species (for example sowing and harvesting of rice plants followed by sowing and harvesting of further rice plants all within one conventional growing period). Similarly, if the growth rate is sufficiently increased, it may allow for the further sowing of seeds of different plants species (for example the sowing and harvesting of corn plants followed by, for example, the sowing and optional harvesting of soybean, potato or any other suitable plant). Harvesting additional times from the same rootstock in the case of some crop plants may also be possible. Altering the harvest cycle of a plant may lead to an increase in annual biomass production per square meter (due to an increase in the number of times (say in a year) that any particular plant may be grown and harvested). An increase in growth rate may also allow for the cultivation of transgenic plants in a wider geographical area than their wild-type counterparts, since the territorial limitations for growing a crop are often determined by adverse environmental conditions either at the time of planting (early season) or at the time of harvesting (late season). Such adverse conditions may be avoided if the harvest cycle is shortened. The growth rate may be determined by deriving various parameters from growth curves, such parameters may be: T-Mid (the time taken for plants to reach 50% of their maximal size) and 1-90 (time taken for plants to reach 90% of their maximal size), amongst others.

[0549] According to a preferred feature of the present invention, performance of the methods of the invention gives plants having an increased growth rate relative to control plants. Therefore, according to the present invention, there is provided a method for increasing the growth rate of plants, which method comprises modulating expression in a plant of a nucleic acid encoding a bHLH11-like polypeptide as defined herein.

[0550] An increase in yield and/or growth rate occurs whether the plant is under non-stress conditions or whether the plant is exposed to various stresses compared to control plants. Plants typically respond to exposure to stress by growing more slowly. In conditions of severe stress, the plant may even stop growing altogether. Mild stress on the other hand is defined herein as being any stress to which a plant is exposed which does not result in the plant ceasing to grow altogether without the capacity to resume growth. Mild stress in the sense of the invention leads to a reduction in the growth of the stressed plants of less than 40%, 35% or 30%, preferably less than 25%, 20% or 15%, more preferably less than 14%, 13%, 12%, 11% or 10% or less in comparison to the control plant under non-stress conditions. Due to advances in agricultural practices (irrigation, fertilization, pesticide treatments) severe stresses are not often encountered in cultivated crop plants. As a consequence, the compromised growth induced by mild stress is often an undesirable feature for agriculture. Mild stresses are the everyday biotic and/or abiotic (environmental) stresses to which a plant is exposed. Abiotic stresses may be due to drought or excess water, anaerobic stress, salt stress, chemical toxicity, oxidative stress and hot, cold or freezing temperatures. The abiotic stress may be an osmotic stress caused by a water stress (particularly due to drought), salt stress, oxidative stress or an ionic stress. Biotic stresses are typically those stresses caused by pathogens, such as bacteria, viruses, fungi, nematodes and insects.

[0551] In particular, the methods of the present invention may be performed under non-stress conditions or under conditions of mild drought to give plants having increased yield relative to control plants. As reported in Wang et al. (Planta (2003) 218: 1-14), abiotic stress leads to a series of morphological, physiological, biochemical and molecular changes that adversely affect plant growth and productivity. Drought, salinity, extreme temperatures and oxidative stress are known to be interconnected and may induce growth and cellular damage through similar mechanisms. Rabbani et al. (Plant Physiol (2003) 133: 1755-1767) describes a particularly high degree of “cross talk” between drought stress and high-salinity stress. For example, drought and/or salinisation are manifested primarily as osmotic stress, resulting in the disruption of homeostasis and ion distribution in the cell. Oxidative stress, which frequently accompanies high or low temperature, salinity or drought stress, may cause denaturing of functional and structural proteins. As a consequence, these diverse environmental stresses often activate similar cell signalling pathways and cellular responses, such as the production of stress proteins, up-regulation of anti-oxidants, accumulation of compatible solutes and growth arrest. The term “non-stress” conditions as used herein are those environmental conditions that allow optimal growth of plants. Persons skilled in the art are aware of normal soil conditions and climatic conditions for a given location. Plants with optimal growth conditions, (grown under non-stress conditions) typically yield in increasing order of preference at least 90%, 87%, 85%; 83%, 80%, 77% or 75% of the average production of such plant in a given environment. Average production may be calculated on harvest and/or season basis. Persons skilled in the art are aware of average yield productions of a crop.

[0552] Performance of the methods of the invention gives plants grown under non-stress conditions or under mild drought conditions increased yield relative to control plants grown under comparable conditions. Therefore, according to the present invention, there is provided a method for increasing yield in plants grown under non-stress conditions or under mild drought conditions, which method comprises modulating expression in a plant of a nucleic acid encoding a bHLH11-like polypeptide.

[0553] Performance of the methods of the invention gives plants grown under conditions of nutrient deficiency, particularly under conditions of nitrogen deficiency, increased yield relative to control plants grown under comparable conditions. Therefore, according to the present invention, there is provided a method for increasing yield in plants grown under conditions of nutrient deficiency, which method comprises modulating expression in a plant of a nucleic acid encoding a bHLH11-like polypeptide, provided that the nutrient deficiency is not a phosphate deficiency. Nutrient deficiency may result from a lack of nutrients such as nitrogen, phosphates and other phosphorous-containing compounds, potassium, calcium, cadmium, magnesium, manganese, iron and boron, amongst others. However, the term “nutrient deficiency” as used in the context of the present invention does not encompass a deficiency in phosphate.

[0554] The present invention encompasses plants or parts thereof (including seeds) obtainable by the methods according to the present invention. The plants or parts thereof comprise a nucleic acid transgene encoding a bHLH11-like polypeptide as defined above.

[0555] The invention also provides genetic constructs and vectors to facilitate introduction and/or expression in plants of nucleic acids encoding bHLH11-like polypeptides. The gene constructs may be inserted into vectors, which may be commercially available, suitable for transforming into plants and suitable for expression of the gene of interest in the transformed cells. The invention also provides use of a gene construct as defined herein in the methods of the invention.

[0556] More specifically, the present invention provides a construct comprising:
[0557] (a) a nucleic acid encoding a bHLH11-like polypeptide as defined above;
[0558] (b) one or more control sequences capable of driving expression of the nucleic acid sequence of (a); and optionally
[0559] (c) a transcription termination sequence.

[0560] Preferably, the nucleic acid encoding a bHLH11-like polypeptide is as defined above. The term “control sequence” and “termination sequence” are as defined herein.

[0561] Plants are transformed with a vector comprising any of the nucleic acids described above. The skilled artisan is well aware of the genetic elements that must be present on the vector in order to successfully transform, select and propagate host cells containing the sequence of interest. The sequence of interest is operably linked to one or more control sequences (at least to a promoter).

[0562] Advantageously, any type of promoter, whether natural or synthetic, may be used to drive expression of the nucleic acid sequence, but preferably the promoter is of plant origin. A constitutive promoter is particularly useful in the methods. Preferably the constitutive promoter is also a ubiquitous promoter of medium strength. See the “Definitions” section herein for definitions of the various promoter types.

[0563] It should be clear that the applicability of the present invention is not restricted to the bHLH11-like polypeptide-encoding nucleic acid represented by SEQ ID NO: 1, nor is the applicability of the invention restricted to expression of a bHLH11-like polypeptide-encoding nucleic acid when driven by a constitutive promoter.

[0564] The constitutive promoter is preferably a medium strength promoter, such as a GOS2 promoter, preferably the promoter is a GOS2 promoter from rice. Further preferably the constitutive promoter is represented by a nucleic acid sequence substantially similar to SEQ ID NO: 256, most preferably the constitutive promoter is as represented by SEQ ID NO: 256. See the “Definitions” section herein for further examples of constitutive promoters.

[0565] Optionally, one or more terminator sequences may be used in the construct introduced into a plant. Preferably, the construct comprises an expression cassette comprising the GOS2 promoter substantially similar to SEQ ID NO: 256 and the nucleic acid encoding the bHLH11-like polypeptide.

[0566] Additional regulatory elements may include transcriptional as well as translational enhancers. Those skilled in the art will be aware of terminator and enhancer sequences that may be suitable for use in performing the invention. An intron sequence may also be added to the 5′ untranslated region (UTR) or in the coding sequence to increase the amount of the mature message that accumulates in the cytosol, as described in the definitions section. Other control sequences (besides promoter, enhancer, silencer, intron sequences, 3′UTR and/or 5′UTR regions) may be protein and/or RNA stabilizing elements. Such sequences would be known or may readily be obtained by a person skilled in the art.

[0567] The genetic constructs of the invention may further include an origin of replication sequence that is required for maintenance and/or replication in a specific cell type. One example is when a genetic construct is required to be maintained in a bacterial cell as an episomal genetic element (e.g. plasmid or cosmid molecule). Preferred origins of replication include, but are not limited to, the f1-ori and colE1.

[0568] For the detection of the successful transfer of the nucleic acid sequences as used in the methods of the invention and/or selection of transgenic plants comprising these nucleic acids, it is advantageous to use marker genes (or reporter genes). Therefore, the genetic construct may optionally comprise a selectable marker gene. Selectable markers are described in more detail in the “definitions” section herein. The marker genes may be removed or excised from the transgenic cell once they are no longer needed. Techniques for marker removal are known in the art, useful techniques are described above in the definitions section.

[0569] The invention also provides a method for the production of transgenic plants having enhanced yield-related traits relative to control plants, comprising introduction and expression in a plant of any nucleic acid encoding a bHLH11-like polypeptide as defined hereinabove.

[0570] More specifically, the present invention provides a method for the production of transgenic plants having increased enhanced yield-related traits, particularly increased (seed) yield, which method comprises:
[0571] (i) introducing and expressing in a plant or plant cell a bHLH11-like polypeptide-encoding nucleic acid; and
[0572] (ii) cultivating the plant cell under conditions promoting plant growth and development.

[0573] The nucleic acid of (i) may be any of the nucleic acids capable of encoding a bHLH11-like polypeptide as defined herein.

[0574] The nucleic acid may be introduced directly into a plant cell or into the plant itself (including introduction into a tissue, organ or any other part of a plant). According to a preferred feature of the present invention, the nucleic acid is preferably introduced into a plant by transformation. The term “transformation” is described in more detail in the “definitions” section herein.

[0575] The genetically modified plant cells can be regenerated via all methods with which the skilled worker is familiar. Suitable methods can be found in the abovementioned publications by S. D. Kung and R. Wu, Potrykus or Höfgen and Willmitzer.

[0576] Generally after transformation, plant cells or cell groupings are selected for the presence of one or more markers which are encoded by plant-expressible genes co-transferred with the gene of interest, following which the transformed material is regenerated into a whole plant. To select transformed plants, the plant material obtained in the transformation is, as a rule, subjected to selective conditions so that transformed plants can be distinguished from untransformed plants. For example, the seeds obtained in the above-described manner can be planted and, after an initial growing period, subjected to a suitable selection by spraying. A further possibility consists in growing the seeds, if appropriate after sterilization, on agar plates using a suitable selection agent so that only the transformed seeds can grow into plants. Alternatively, the transformed plants are screened for the presence of a selectable marker such as the ones described above.

[0577] Following DNA transfer and regeneration, putatively transformed plants may also be evaluated, for instance using Southern analysis, for the presence of the gene of interest, copy number and/or genomic organisation. Alternatively or additionally, expression levels of the newly introduced DNA may be monitored using Northern and/or Western analysis, both techniques being well known to persons having ordinary skill in the art.

[0578] The generated transformed plants may be propagated by a variety of means, such as by clonal propagation or classical breeding techniques. For example, a first generation (or T1) transformed plant may be selfed and homozygous second-generation (or T2) transformants selected, and the T2 plants may then further be propagated through classical breeding techniques. The generated transformed organisms may take a variety of forms. For example, they may be chimeras of transformed cells and non-transformed cells; clonal transformants (e.g., all cells transformed to contain the expression cassette); grafts of transformed and untransformed tissues (e.g., in plants, a transformed rootstock grafted to an untransformed scion).

[0579] The present invention clearly extends to any plant cell or plant produced by any of the methods described herein, and to all plant parts and propagules thereof. The present invention extends further to encompass the progeny of a primary transformed or transfected cell, tissue, organ or whole plant that has been produced by any of the aforementioned methods, the only requirement being that progeny exhibit the same genotypic and/or phenotypic characteristic(s) as those produced by the parent in the methods according to the invention.

[0580] The invention also includes host cells containing an isolated nucleic acid encoding a bHLH11-like polypeptide as defined hereinabove. Preferred host cells according to the invention are plant cells. Host plants for the nucleic acids or the vector used in the method according to the invention, the expression cassette or construct or vector are, in principle, advantageously all plants, which are capable of synthesizing the polypeptides used in the inventive method.

[0581] The methods of the invention are advantageously applicable to any plant. Plants that are particularly useful in the methods of the invention include all plants which belong to the superfamily Viridiplantae, in particular monocotyledonous and dicotyledonous plants including fodder or forage legumes, ornamental plants, food crops, trees or shrubs. According to a preferred embodiment of the present invention, the plant is a crop plant. Examples of crop plants include soybean, sunflower, canola, alfalfa, rapeseed, linseed, cotton, tomato, potato and tobacco. Further preferably, the plant is a monocotyledonous plant. Examples of monocotyledonous plants include sugarcane. More preferably the plant is a cereal. Examples of cereals include rice, maize, wheat, barley, millet, rye, triticale, sorghum, emmer, spelt, secale, einkorn, teff, milo and oats.

[0582] The invention also extends to harvestable parts of a plant such as, but not limited to seeds, leaves, fruits, flowers, stems, roots, rhizomes, tubers and bulbs, which harvestable parts comprise a recombinant nucleic acid encoding a bHLH11-like polypeptide. The invention furthermore relates to products derived, preferably directly derived, from a harvestable part of such a plant, such as dry pellets or powders, oil, fat and fatty acids, starch or proteins.

[0583] According to a preferred feature of the invention, the modulated expression is increased expression. Methods for increasing expression of nucleic acids or genes, or gene products, are well documented in the art and examples are provided in the definitions section.

[0584] As mentioned above, a preferred method for modulating expression of a nucleic acid encoding a bHLH11-like polypeptide is by introducing and expressing in a plant a nucleic acid encoding a bHLH11-like polypeptide; however the effects of performing the method, i.e. enhancing yield-related traits may also be achieved using other well known techniques, including but not limited to T-DNA activation tagging, TILLING, homologous recombination. A description of these techniques is provided in the definitions section.

[0585] The present invention also encompasses use of nucleic acids encoding bHLH11-like polypeptides as described herein and use of these bHLH11-like polypeptides in enhancing any of the aforementioned yield-related traits in plants.

[0586] Nucleic acids encoding bHLH11-like polypeptide described herein, or the bHLH11-like polypeptides themselves, may find use in breeding programmes in which a DNA marker is identified which may be genetically linked to a bHLH11-like polypeptide-encoding gene. The nucleic acids/genes, or the bHLH11-like polypeptides themselves may be used to define a molecular marker. This DNA or protein marker may then be used in breeding programmes to select plants having enhanced yield-related traits as defined hereinabove in the methods of the invention.

[0587] Allelic variants of a bHLH11-like polypeptide-encoding nucleic acid/gene may also find use in marker-assisted breeding programmes. Such breeding programmes sometimes require introduction of allelic variation by mutagenic treatment of the plants, using for example EMS mutagenesis; alternatively, the programme may start with a collection of allelic variants of so called “natural” origin caused unintentionally. Identification of allelic variants then takes place, for example, by PCR. This is followed by a step for selection of superior allelic variants of the sequence in question and which give increased yield. Selection is typically carried out by monitoring growth performance of plants containing different allelic variants of the sequence in question. Growth performance may be monitored in a greenhouse or in the field. Further optional steps include crossing plants in which the superior allelic variant was identified with another plant. This could be used, for example, to make a combination of interesting phenotypic features.

[0588] Nucleic acids encoding bHLH11-like polypeptides may also be used as probes for genetically and physically mapping the genes that they are a part of, and as markers for traits linked to those genes. Such information may be useful in plant breeding in order to develop lines with desired phenotypes. Such use of bHLH11-like polypeptide-encoding nucleic acids requires only a nucleic acid sequence of at least 15 nucleotides in length. The bHLH11-like polypeptide-encoding nucleic acids may be used as restriction fragment length polymorphism (RFLP) markers. Southern blots (Sambrook J, Fritsch E F and Maniatis T (1989) Molecular Cloning, A Laboratory Manual) of restriction-digested plant genomic DNA may be probed with the bHLH11-like-encoding nucleic acids. The resulting banding patterns may then be subjected to genetic analyses using computer programs such as MapMaker (Lander et al. (1987) Genomics 1: 174-181) in order to construct a genetic map. In addition, the nucleic acids may be used to probe Southern blots containing restriction endonuclease-treated genomic DNAs of a set of individuals representing parent and progeny of a defined genetic cross. Segregation of the DNA polymorphisms is noted and used to calculate the position of the bHLH11-like polypeptide-encoding nucleic acid in the genetic map previously obtained using this population (Botstein at al. (1980) Am. J. Hum. Genet. 32:314-331).

[0589] The production and use of plant gene-derived probes for use in genetic mapping is described in Bernatzky and Tanksley (1986) Plant Mal. Biol. Reporter 4: 37-41. Numerous publications describe genetic mapping of specific cDNA clones using the methodology outlined above or variations thereof. For example, F2 intercross populations, backcross populations, randomly mated populations, near isogenic lines, and other sets of individuals may be used for mapping. Such methodologies are well known to those skilled in the art.

[0590] The nucleic acid probes may also be used for physical mapping (i.e., placement of sequences on physical maps; see Hoheisel at al. in: Non-mammalian Genomic Analysis: A Practical Guide, Academic press 1996, pp. 319-346, and references cited therein).

[0591] In another embodiment, the nucleic acid probes may be used in direct fluorescence in situ hybridisation (FISH) mapping (Trask (1991) Trends Genet. 7:149-154). Although current methods of FISH mapping favour use of large clones (several kb to several hundred kb; see Laan et al. (1995) Genome Res. 5:13-20), improvements in sensitivity may allow performance of FISH mapping using shorter probes.

[0592] A variety of nucleic acid amplification-based methods for genetic and physical mapping may be carried out using the nucleic acids. Examples include allele-specific amplification (Kazazian (1989) J. Lab. Clin. Med. 11:95-96), polymorphism of PCR-amplified fragments (CAPS; Sheffield at al. (1993) Genomics 16:325-332), allele-specific ligation (Landegren et al. (1988) Science 241:1077-1080), nucleotide extension reactions (Sokolov (1990) Nucleic Acid Res. 18:3671), Radiation Hybrid Mapping (Walter et al. (1997) Nat. Genet. 7:22-28) and Happy Mapping (Dear and Cook (1989) Nucleic Acid Res. 17:6795-6807). For these methods, the sequence of a nucleic acid is used to design and produce primer pairs for use in the amplification reaction or in primer extension reactions. The design of such primers is well known to those skilled in the art. In methods employing PCR-based genetic mapping, it may be necessary to identify DNA sequence differences between the parents of the mapping cross in the region corresponding to the instant nucleic acid sequence. This, however, is generally not necessary for mapping methods.

[0593] The methods according to the present invention result in plants having enhanced yield-related traits, as described hereinbefore. These traits may also be combined with other economically advantageous traits, such as further yield-enhancing traits, tolerance to other abiotic and biotic stresses, traits modifying various architectural features and/or biochemical and/or physiological features.

### VI. ASR (Abscisic Acid-, Stress-, and Ripening-Induced) Polypeptide

[0594] A preferred method for modulating (preferably, increasing) expression of a nucleic acid encoding an ASR polypeptide is by introducing and expressing in a plant a nucleic acid encoding an ASR polypeptide.

[0595] Any reference hereinafter to a “protein useful in the methods of the invention” is taken to mean 3D an ASR polypeptide as defined herein. Any reference hereinafter to a “nucleic acid useful in the methods of the invention” is taken to mean a nucleic acid capable of encoding such an ASR polypeptide. The nucleic acid to be introduced into a plant (and therefore useful in performing the methods of the invention) is any nucleic acid encoding the type of protein which will now be described, hereafter also named “ASR nucleic acid” or “ASR gene”.

[0596] A “ASR polypeptide” as defined herein refers the proteins represented by SEQ ID NO: 397 and to homologues (orthologues and paralogues) thereof.

[0597] Preferably, the homologues of SEQ ID NO: 397 have a ABA WDS domain (Pfam entry PF02496).

[0598] Further Preferably ASR polypeptides of the invention are those having in increasing order of preference at least 50%, 55%, 60%, 65%, 70%, 75%, 80%, 83%, 85%, 87%, 90%, 91%, 92%, 93%, 94%, 95%, 96%, 97%, 98%, 99%, or more sequence identity to any of the polypeptides given in Table Ft The term “domain” and “motif” is defined in the “definitions” section herein. Specialist databases exist for the identification of domains, for example, SMART (Schultz et al. (1998) Proc. Natl. Acad. Sci. USA 95, 5857-5864; Letunic et al. (2002) Nucleic Acids Res 30, 242-244), InterPro (Mulder et al., (2003) Nucl. Acids. Res. 31, 315-318), Prosite (Bucher and Bairoch (1994), A generalized profile syntax for biomolecular sequences motifs and its function in automatic sequence interpretation. (In) ISMB-94; Proceedings 2nd International Conference on Intelligent Systems for Molecular Biology. Altman R., Brutlag D., Karp P., Lathrop R., Searls D., Eds., pp 53-61, AAAI Press, Menlo Park; Hulo et al., Nucl. Acids. Res. 32:D134-D137, (2004)), or Pfam (Bateman et al., Nucleic Acids Research 30(1): 276-280 (2002)). A set of tools for in silico analysis of protein sequences is available on the ExPASy proteomics server (Swiss Institute of Bioinformatics (Gasteiger et al., ExPASy: the proteomics server for in-depth protein knowledge and analysis, Nucleic Acids Res. 31:3784-3788 (2003)). Domains or motifs may also be identified using routine techniques, such as by sequence alignment.

[0599] Methods for the alignment of sequences for comparison are well known in the art, such methods include GAP, BESTFIT, BLAST, FASTA and TFASTA. GAP uses the algorithm of Needleman and Wunsch ((1970) J Mol Biol 48: 443-453) to find the global (i.e. spanning the complete sequences) alignment of two sequences that maximizes the number of matches and minimizes the number of gaps. The BLAST algorithm (Altschul et al. (1990) J Mol Biol 215: 403-10) calculates percent sequence identity and performs a statistical analysis of the similarity between the two sequences. The software for performing BLAST analysis is publicly available through the National Centre for Biotechnology Information (NCBI). Homologues may readily be identified using, for example, the ClustalW multiple sequence alignment algorithm (version 1.83), with the default pairwise alignment parameters, and a scoring method in percentage. Global percentages of similarity and identity may also be determined using one of the methods available in the MatGAT software package (Campanella et al., BMC Bioinformatics. 2003 Jul. 10; 4:29. MatGAT: an application that generates similarity/identity matrices using protein or DNA sequences.). Minor manual editing may be performed to optimise alignment between conserved motifs, as would be apparent to a person skilled in the art. Furthermore, instead of using full-length sequences for the identification of homologues, specific domains may also be used. The sequence identity values may be determined over the entire nucleic acid or amino acid sequence or over selected domains or conserved motif(s), using the programs mentioned above using the default parameters.

[0600] Furthermore, ASR polypeptides (at least in their native form), as far as SEQ ID NO: 397 and its homologues are concerned, typically have the capability to increase salt stress resistance of plants. Tools and techniques for expressing the ASR in plants and testing for increased salt stress resistance are well known in the art.

[0601] The present invention is illustrated by transforming plants with the nucleic acid sequence represented by SEQ ID NO: 396, encoding the polypeptide sequence of SEQ ID NO: 397. However, performance of the invention is not restricted to these sequences; the methods of the invention may advantageously be performed using any ASR-encoding nucleic acid or ASR polypeptide as defined herein.

[0602] Examples of nucleic acids encoding ASR polypeptides may be found in databases known in the art. Such nucleic acids are useful in performing the methods of the invention. Orthologues and paralogues, the terms “orthologues” and “paralogues” being as defined herein, may readily be identified by performing a so-called reciprocal blast search. Typically, this involves a first BLAST involving BLASTing a query sequence (for example using SEQ ID NO: 397) against any sequence database, such as the publicly available NCBI database. BLASTN or TBLASTX (using standard default values) are generally used when starting from a nucleotide sequence, and BLASTP or TBLASTN (using standard default values) when starting from a protein sequence. The BLAST results may optionally be filtered. The full-length sequences of either the filtered results or non-filtered results are then BLASTed back (second BLAST) against sequences from the organism from which the query sequence is derived (where the query sequence is SEQ ID NO: 396 or SEQ ID NO: 397, the second BLAST would therefore be against Oryza sativa sequences). The results of the first and second BLASTs are then compared. A paralogue is identified if a high-ranking hit from the first blast is from the same species as from which the query sequence is derived, a BLAST back then ideally results in the query sequence amongst the highest hits; an orthologue is identified if a high-ranking hit in the first BLAST is not from the same species as from which the query sequence is derived, and preferably results upon BLAST back in the query sequence being among the highest hits.

[0603] High-ranking hits are those having a low E-value. The lower the E-value, the more significant the score (or in other words the lower the chance that the hit was found by chance). Computation of the E-value is well known in the art. In addition to E-values, comparisons are also scored by percentage identity. Percentage identity refers to the number of identical nucleotides (or amino acids) between the two compared nucleic acid (or polypeptide) sequences over a particular length. In the case of large families, ClustalW may be used, followed by a neighbour joining tree, to help visualize clustering of related genes and to identify orthologues and paralogues.

[0604] Nucleic acid variants encoding homologues and derivatives of SEQ ID NO: 397 may also be useful in practising the methods of the invention, the terms “homologue” and “derivative” being as defined herein. Also useful in the methods of the invention are nucleic acids encoding homologues and derivatives of orthologues or paralogues of SEQ ID NO: 397. Homologues and derivatives useful in the methods of the present invention have substantially the same biological and functional activity as the unmodified protein from which they are derived.

[0605] Further nucleic acid variants useful in practising the methods of the invention include portions of nucleic acids encoding ASR polypeptides, nucleic acids hybridising to nucleic acids encoding ASR polypeptides, splice variants of nucleic acids encoding ASR polypeptides, allelic variants of nucleic acids encoding ASR polypeptides and variants of nucleic acids encoding ASR polypeptides obtained by gene shuffling. The terms hybridising sequence, splice variant, allelic variant and gene shuffling are as described herein.

[0606] Nucleic acids encoding ASR polypeptides need not be full-length nucleic acids, since performance of the methods of the invention does not rely on the use of full-length nucleic acid sequences. According to the present invention, there is provided a method for enhancing yield-related traits in plants, comprising introducing and expressing in a plant a portion of SEQ ID NO: 396, or a portion of a nucleic acid encoding an orthologue, paralogue or homologue of SEQ ID NO: 397.

[0607] A portion of a nucleic acid may be prepared, for example, by making one or more deletions to the nucleic acid. The portions may be used in isolated form or they may be fused to other coding (or non-coding) sequences in order to, for example, produce a protein that combines several activities. When fused to other coding sequences, the resultant polypeptide produced upon translation may be bigger than that predicted for the protein portion.

[0608] Portions useful in the methods of the invention, encode an ASR polypeptide as defined herein, and have substantially the same biological activity as the amino acid sequences given in SEQ ID NO: 397. Preferably, the portion is a portion of any one of the nucleic acids given in SEQ ID NO: 396, or is a portion of a nucleic acid encoding an orthologue or paralogue of any one of the amino acid sequences given in SEQ ID NO: 396. Preferably the portion is at least 400, 450, 500, 550, 600, 650, 700, 750 consecutive nucleotides in length, the consecutive nucleotides being of SEQ ID NO: 396, or of a nucleic acid encoding an orthologue or paralogue of SEQ ID NO: 397. Most preferably the portion is a portion of the nucleic acid of SEQ ID NO: 396.

[0609] Another nucleic acid variant useful in the methods of the invention is a nucleic acid capable of hybridising, under reduced stringency conditions, preferably under stringent conditions, with a nucleic acid encoding an ASR polypeptide as defined herein, or with a portion as defined herein.

[0610] According to the present invention, there is provided a method for enhancing yield-related traits in plants, comprising introducing and expressing in a plant a nucleic acid capable of hybridizing to SEQ ID NO: 396, or comprising introducing and expressing in a plant a nucleic acid capable of hybridising to a nucleic acid encoding an orthologue, paralogue or homologue of SEQ ID NO: 396.

[0611] Hybridising sequences useful in the methods of the invention encode an ASR polypeptide as defined herein, having substantially the same biological activity as the amino acid sequences given in SEQ ID NO: 397. Preferably, the hybridising sequence is capable of hybridising to SEQ ID NO: 396, or to a portion of any of these sequences, a portion being as defined above, or the hybridising sequence is capable of hybridising to a nucleic acid encoding an orthologue or paralogue of SEQ ID NO: 397.

[0612] Another nucleic acid variant useful in the methods of the invention is a splice variant encoding an ASR polypeptide as defined hereinabove, a splice variant being as defined herein.

[0613] According to the present invention, there is provided a method for enhancing yield-related traits in plants, comprising introducing and expressing in a plant a splice variant of SEQ ID NO: 396, or a splice variant of a nucleic acid encoding an orthologue, paralogue or homologue of SEQ ID NO: 397.

[0614] Another nucleic acid variant useful in performing the methods of the invention is an allelic variant of a nucleic acid encoding an ASR polypeptide as defined hereinabove, an allelic variant being as defined herein.

[0615] According to the present invention, there is provided a method for enhancing yield-related traits in plants, comprising introducing and expressing in a plant an allelic variant of SEQ ID NO: 396, or comprising introducing and expressing in a plant an allelic variant of a nucleic acid encoding an orthologue, paralogue or homologue of the amino acid sequences represented by SEQ ID NO: 397.

[0616] The allelic variants useful in the methods of the present invention have substantially the same biological activity as the ASR polypeptide of SEQ ID NO: 397. Allelic variants exist in nature, and encompassed within the methods of the present invention is the use of these natural alleles. Gene shuffling or directed evolution may also be used to generate variants of nucleic acids encoding ASR polypeptides as defined above; the term “gene shuffling” being as defined herein.

[0617] According to the present invention, there is provided a method for enhancing yield-related traits in plants, comprising introducing and expressing in a plant a variant of SEQ ID NO: 396, or comprising introducing and expressing in a plant a variant of a nucleic acid encoding an orthologue, paralogue or homologue of SEQ ID NO: 397, which variant nucleic acid is obtained by gene shuffling.

[0618] Furthermore, nucleic acid variants may also be obtained by site-directed mutagenesis. Several methods are available to achieve site-directed mutagenesis, the most common being PCR based methods (Current Protocols in Molecular Biology. Wiley Eds.).

[0619] Nucleic acids encoding ASR polypeptides may be derived from any natural or artificial source. The nucleic acid may be modified from its native form in composition and/or genomic environment through deliberate human manipulation. Preferably the ASR polypeptide-encoding nucleic acid is from a plant. In the case of SEQ ID NO: 396, the ASR polypeptide encoding nucleic acid is preferably from a monocotyledonous plant, more preferably from the family Poaceae, most preferably the nucleic acid is from Oryza sativa.

[0620] The invention also provides hitherto unknown ASR-encoding nucleic acids and ASR polypeptides.

[0621] According to a further embodiment of the present invention, there is therefore provided an isolated nucleic acid molecule selected from:
[0622] (i) a nucleic acid represented by any one of SEQ ID NO: 401, 403, 405, 407, 409, 411, 413, 415 and 417;
[0623] (ii) the complement of a nucleic acid represented by any one of SEQ ID NO: 401, 403, 405, 407, 409, 411, 413, 415 and 417;
[0624] (iii) a nucleic acid encoding an ASR polypeptide having, in increasing order of preference, at least 50%, 55%, 60%, 65%, 70%, 75%, 80%, 85%, 90%, 95%, 96%, 97%, 98%, 99% or more sequence identity to the amino acid sequence represented by any one of SEQ ID NO: 402, 404, 406, 408, 410, 412, 414, 416 and 418.

[0625] According to a further embodiment of the present invention, there is also provided an isolated polypeptide selected from:
[0626] (i) an amino acid sequence represented by any one of SEQ ID NO: 402, 404, 406, 408, 410, 412, 414, 416 and 418;
[0627] (ii) an amino acid sequence having, in increasing order of preference, at least 50%, 55%, 60%, 65%, 70%, 75%, 80%, 85%, 90%, 95%, 96%, 97%, 98%, 99% or more sequence identity to the amino acid sequence represented any one of SEQ ID NO: 402, 404, 406, 408, 410, 412, 414, 416 and 418.
[0628] (iii) derivatives of any of the amino acid sequences given in (i) or (ii) above.

[0629] Performance of the methods of the invention gives plants having enhanced yield-related traits. In particular performance of the methods of the invention gives plants having increased early vigour and increased yield, especially increased biomass and increased seed yield relative to control plants. The terms “yield” and “seed yield” are described in more detail in the “definitions” section herein.

[0630] Reference herein to enhanced yield-related traits is taken to mean an increase in early vigour and/or in biomass (weight) of one or more parts of a plant, which may include aboveground (harvestable) parts and/or (harvestable) parts below ground. In particular, such harvestable parts are biomass and/or seeds, and performance of the methods of the invention results in plants having increased early vigour, biomass and/or seed yield relative to the early vigour, biomass or seed yield of control plants.

[0631] Taking corn as an example, a yield increase may be manifested as one or more of the following: increase in the number of plants established per hectare or acre, an increase in the number of ears per plant, an increase in the number of rows, number of kernels per row, kernel weight, thousand kernel weight, ear length/diameter, increase in the seed filling rate (which is the number of filled seeds divided by the total number of seeds and multiplied by 100), among others. Taking rice as an example, a yield increase may manifest itself as an increase in one or more of the following: number of plants per hectare or acre, number of panicles per plant, number of spikelets per panicle, number of flowers (florets) per panicle (which is expressed as a ratio of the number of filled seeds over the number of primary panicles), increase in the seed filling rate (which is the number of filled seeds divided by the total number of seeds and multiplied by 100), increase in thousand kernel weight, among others.

[0632] The present invention provides a method for increasing yield, especially biomass and/or seed yield of plants, relative to control plants, which method comprises modulating expression, preferably increasing expression, in a plant of a nucleic acid encoding an ASR polypeptide as defined herein.

[0633] Since the transgenic plants according to the present invention have increased yield, it is likely that these plants exhibit an increased growth rate (during at least part of their life cycle), relative to the growth rate of control plants at a corresponding stage in their life cycle.

[0634] The increased growth rate may be specific to one or more parts of a plant (including seeds), or may be throughout substantially the whole plant. Plants having an increased growth rate may have a shorter life cycle. The life cycle of a plant may be taken to mean the time needed to grow from a dry mature seed up to the stage where the plant has produced dry mature seeds, similar to the starting material. This life cycle may be influenced by factors such as early vigour, growth rate, greenness index, flowering time and speed of seed maturation. The increase in growth rate may take place at one or more stages in the life cycle of a plant or during substantially the whole plant life cycle. Increased growth rate during the early stages in the life cycle of a plant may reflect enhanced vigour. The increase in growth rate may alter the harvest cycle of a plant allowing plants to be sown later and/or harvested sooner than would otherwise be possible (a similar effect may be obtained with earlier flowering time). If the growth rate is sufficiently increased, it may allow for the further sowing of seeds of the same plant species (for example sowing and harvesting of rice plants followed by sowing and harvesting of further rice plants all within one conventional growing period). Similarly, if the growth rate is sufficiently increased, it may allow for the further sowing of seeds of different plants species (for example the sowing and harvesting of corn plants followed by, for example, the sowing and optional harvesting of soybean, potato or any other suitable plant). Harvesting additional times from the same rootstock in the case of some crop plants may also be possible. Altering the harvest cycle of a plant may lead to an increase in annual biomass production per acre (due to an increase in the number of times (say in a year) that any particular plant may be grown and harvested). An increase in growth rate may also allow for the cultivation of transgenic plants in a wider geographical area than their wild-type counterparts, since the territorial limitations for growing a crop are often determined by adverse environmental conditions either at the time of planting (early season) or at the time of harvesting (late season). Such adverse conditions may be avoided if the harvest cycle is shortened. The growth rate may be determined by deriving various parameters from growth curves, such parameters may be: T-Mid (the time taken for plants to reach 50% of their maximal size) and T-90 (time taken for plants to reach 90% of their maximal size), amongst others.

[0635] According to a preferred feature of the present invention, performance of the methods of the invention gives plants having an increased growth rate relative to control plants. Therefore, according to the present invention, there is provided a method for increasing the growth rate of plants, which method comprises modulating expression, preferably increasing expression, in a plant of a nucleic acid encoding an ASR polypeptide as defined herein. In a particular embodiment, performance of the methods of the present invention gives plants with increased early vigour.

[0636] An increase in yield and/or growth rate occurs whether the plant is under non-stress conditions or whether the plant is exposed to various stresses compared to control plants. Plants typically respond to exposure to stress by growing more slowly. In conditions of severe stress, the plant may even stop growing altogether. Mild stress on the other hand is defined herein as being any stress to which a plant is exposed which does not result in the plant ceasing to grow altogether without the capacity to resume growth. Mild stress in the sense of the invention leads to a reduction in the growth of the stressed plants of less than 40%, 35% or 30%, preferably less than 25%, 20% or 15%, more preferably less than 14%, 13%, 12%, 11% or 10% or less in comparison to the control plant under non-stress conditions. Due to advances in agricultural practices (irrigation, fertilization, pesticide treatments) severe stresses are not often encountered in cultivated crop plants. As a consequence, the compromised growth induced by mild stress is often an undesirable feature for agriculture. Mild stresses are the everyday biotic and/or abiotic (environmental) stresses to which a plant is exposed. Abiotic stresses may be due to drought or excess water, anaerobic stress, salt stress, chemical toxicity, oxidative stress and hot, cold or freezing temperatures. The abiotic stress may be an osmotic stress caused by a water stress (particularly due to drought), salt stress, oxidative stress or an ionic stress. Biotic stresses are typically those stresses caused by pathogens, such as bacteria, viruses, fungi and insects.

[0637] In particular, the methods of the present invention may be performed under non-stress conditions or under conditions of mild drought to give plants having increased yield relative to control plants. As reported in Wang et al. (Planta (2003) 218: 1-14), abiotic stress leads to a series of morphological, physiological, biochemical and molecular changes that adversely affect plant growth and productivity. Drought, salinity, extreme temperatures and oxidative stress are known to be interconnected and may induce growth and cellular damage through similar mechanisms. Rabbani et al. (Plant Physiol (2003) 133: 1755-1767) describes a particularly high degree of “cross talk” between drought stress and high-salinity stress. For example, drought and/or salinisation are manifested primarily as osmotic stress, resulting in the disruption of homeostasis and ion distribution in the cell. Oxidative stress, which frequently accompanies high or low temperature, salinity or drought stress, may cause denaturing of functional and structural proteins. As a consequence, these diverse environmental stresses often activate similar cell signalling pathways and cellular responses, such as the production of stress proteins, up-regulation of anti-oxidants, accumulation of compatible solutes and growth arrest. The term “non-stress” conditions as used herein are those environmental conditions that allow optimal growth of plants. Persons skilled in the art are aware of normal soil conditions and climatic conditions for a given location. Plants with optimal growth conditions, (grown under non-stress conditions) typically yield in increasing order of preference at least 90%, 87%, 85%, 83%, 80%, 77% or 75% of the average production of such plant in a given environment. Average production may be calculated on harvest and/or season basis. Persons skilled in the art are aware of average yield productions of a crop.

[0638] Performance of the methods of the invention gives plants grown under non-stress conditions or under mild drought conditions increased yield and/or increased early vigour, relative to control plants grown under comparable conditions. Therefore, according to the present invention, there is provided a method for increasing yield and/or early vigour in plants grown under non-stress conditions or under mild drought conditions, which method comprises increasing expression in a plant of a nucleic acid encoding an ASR polypeptide.

[0639] Performance of the methods of the invention gives plants grown under conditions of nutrient deficiency, particularly under conditions of nitrogen deficiency, increased yield relative to control plants grown under comparable conditions. Therefore, according to the present invention, there is provided a method for increasing yield in plants grown under conditions of nutrient deficiency, which method comprises increasing expression in a plant of a nucleic acid encoding an ASR polypeptide. Nutrient deficiency may result from a lack of nutrients such as nitrogen, phosphates and other phosphorous-containing compounds, potassium, calcium, cadmium, magnesium, manganese, iron and boron, amongst others.

[0640] The present invention encompasses plants or parts thereof (including seeds) obtainable by the methods according to the present invention. The plants or parts thereof comprise a nucleic acid transgene encoding an ASR polypeptide as defined above.

[0641] The invention also provides genetic constructs and vectors to facilitate introduction and/or expression in plants of nucleic acids encoding ASR polypeptides. The gene constructs may be inserted into vectors, which may be commercially available, suitable for transforming into plants and suitable for expression of the gene of interest in the transformed cells. The invention also provides use of a gene construct as defined herein in the methods of the invention.

[0642] More specifically, the present invention provides a construct comprising:
[0643] (a) a nucleic acid encoding an ASR polypeptide as defined above;
[0644] (b) one or more control sequences capable of driving expression of the nucleic acid sequence of (a); and optionally
[0645] (c) a transcription termination sequence.

[0646] Preferably, the nucleic acid encoding an ASR polypeptide is as defined above. The term “control sequence” and “termination sequence” are as defined herein.

[0647] Plants are transformed with a vector comprising any of the nucleic acids described above. The skilled artisan is well aware of the genetic elements that must be present on the vector in order to successfully transform, select and propagate host cells containing the sequence of interest. The sequence of interest is operably linked to one or more control sequences (at least to a promoter).

[0648] Advantageously, any type of promoter, whether natural or synthetic, may be used to drive expression of the nucleic acid sequence. A constitutive promoter is particularly useful in the methods of the invention. See the “Definitions” section herein for definitions of the various promoter types.

[0649] It should be clear that the applicability of the present invention is not restricted to the ASR polypeptide-encoding nucleic acid represented by SEQ ID NO: 396, nor is the applicability of the invention restricted to expression of an ASR polypeptide-encoding nucleic acid when driven by a constitutive specific promoter.

[0650] The constitutive promoter is preferably a GOS2 promoter, preferably a GOS2 promoter from rice. Further preferably the constitutive promoter is represented by a nucleic acid sequence substantially similar to SEQ ID NO: 398, most preferably the constitutive promoter is as represented by SEQ ID NO: 398. See the “Definitions” section herein for further examples of constitutive promoters.

[0651] Optionally, one or more terminator sequences may be used in the construct introduced into a plant. Additional regulatory elements may include transcriptional as well as translational enhancers. Those skilled in the art will be aware of terminator and enhancer sequences that may be suitable for use in performing the invention. An intron sequence may also be added to the 5′ untranslated region (UTR) or in the coding sequence to increase the amount of the mature message that accumulates in the cytosol, as described in the definitions section. Other control sequences (besides promoter, enhancer, silencer, intron sequences, 3′ UTR and/or 5′ UTR regions) may be protein and/or RNA stabilizing elements. Such sequences would be known or may readily be obtained by a person skilled in the art.

[0652] The genetic constructs of the invention may further include an origin of replication sequence that is required for maintenance and/or replication in a specific cell type. One example is when a genetic construct is required to be maintained in a bacterial cell as an episomal genetic element (e.g. plasmid or cosmid molecule). Preferred origins of replication include, but are not limited to, the f1-ori and colE1.

[0653] For the detection of the successful transfer of the nucleic acid sequences as used in the methods of the invention and/or selection of transgenic plants comprising these nucleic acids, it is advantageous to use marker genes (or reporter genes). Therefore, the genetic construct may optionally comprise a selectable marker gene, Selectable markers are described in more detail in the “definitions” section herein. The marker genes may be removed or excised from the transgenic cell once they are no longer needed. Techniques for marker removal are known in the art, useful techniques are described above in the definitions section.

[0654] The invention also provides a method for the production of transgenic plants having enhanced yield-related traits relative to control plants, comprising introduction and expression in a plant of any nucleic acid encoding an ASR polypeptide as defined hereinabove.

[0655] More specifically, the present invention provides a method for the production of transgenic plants having increased enhanced yield-related traits, particularly increased early vigour and/or increased yield, which method comprises:
[0656] (i) introducing and expressing in a plant or plant cell an ASR polypeptide-encoding nucleic acid; and
[0657] (ii) cultivating the plant cell under conditions promoting plant growth and development.

[0658] The nucleic acid of (i) may be any of the nucleic acids capable of encoding an ASR polypeptide as defined herein.

[0659] The nucleic acid may be introduced directly into a plant cell or into the plant itself (including introduction into a tissue, organ or any other part of a plant). According to a preferred feature of the present invention, the nucleic acid is preferably introduced into a plant by transformation. The term “transformation” is described in more detail in the “definitions” section herein.

[0660] The genetically modified plant cells can be regenerated via all methods with which the skilled worker is familiar. Suitable methods can be found in the abovementioned publications by S. D. Kung and R. Wu, Potrykus or Hagen and Willmitzer.

[0661] Generally after transformation, plant cells or cell groupings are selected for the presence of one or more markers which are encoded by plant-expressible genes co-transferred with the gene of interest, following which the transformed material is regenerated into a whole plant. To select transformed plants, the plant material obtained in the transformation is, as a rule, subjected to selective conditions so that transformed plants can be distinguished from untransformed plants. For example, the seeds obtained in the above-described manner can be planted and, after an initial growing period, subjected to a suitable selection by spraying. A further possibility consists in growing the seeds, if appropriate after sterilization, on agar plates using a suitable selection agent so that only the transformed seeds can grow into plants. Alternatively, the transformed plants are screened for the presence of a selectable marker such as the ones described above.

[0662] Following DNA transfer and regeneration, putatively transformed plants may also be evaluated, for instance using Southern analysis, for the presence of the gene of interest, copy number and/or genomic organisation. Alternatively or additionally, expression levels of the newly introduced DNA may be monitored using Northern and/or Western analysis, both techniques being well known to persons having ordinary skill in the art.

[0663] The generated transformed plants may be propagated by a variety of means, such as by clonal propagation or classical breeding techniques. For example, a first generation (or T1) transformed plant may be selfed and homozygous second-generation (or T2) transformants selected, and the T2 plants may then further be propagated through classical breeding techniques. The generated transformed organisms may take a variety of forms. For example, they may be chimeras of transformed cells and non-transformed cells; clonal transformants (e.g., all cells transformed to contain the expression cassette); grafts of transformed and untransformed tissues (e.g., in plants, a transformed rootstock grafted to an untransformed scion).

[0664] The present invention clearly extends to any plant cell or plant produced by any of the methods described herein, and to all plant parts and propagules thereof. The present invention extends further to encompass the progeny of a primary transformed or transfected cell, tissue, organ or whole plant that has been produced by any of the aforementioned methods, the only requirement being that progeny exhibit the same genotypic and/or phenotypic characteristic(s) as those produced by the parent in the methods according to the invention.

[0665] The invention also includes host cells containing an isolated nucleic acid encoding an ASR polypeptide as defined hereinabove. Preferred host cells according to the invention are plant cells. Host plants for the nucleic acids or the vector used in the method according to the invention, the expression cassette or construct or vector are, in principle, advantageously all plants, which are capable of synthesizing the polypeptides used in the inventive method.

[0666] The methods of the invention are advantageously applicable to any plant. Plants that are particularly useful in the methods of the invention include all plants which belong to the superfamily Viridiplantae, in particular monocotyledonous and dicotyledonous plants including fodder or forage legumes, ornamental plants, food crops, trees or shrubs. According to a preferred embodiment of the present invention, the plant is a crop plant. Examples of crop plants include soybean, sunflower, canola, alfalfa, rapeseed, cotton, tomato, potato and tobacco. Further preferably, the plant is a monocotyledonous plant. Examples of monocotyledonous plants include sugarcane. More preferably the plant is a cereal. Examples of cereals include rice, maize, wheat, barley, millet, rye, triticale, sorghum and oats.

[0667] The invention also extends to harvestable parts of a plant such as, but not limited to seeds, leaves, fruits, flowers, stems, roots, rhizomes, tubers and bulbs. The invention furthermore relates to products derived, preferably directly derived, from a harvestable part of such a plant, such as dry pellets or powders, oil, fat and fatty acids, starch or proteins.

[0668] According to a preferred feature of the invention, the modulated expression is increased expression. Methods for increasing expression of nucleic acids or genes, or gene products, are well documented in the art and examples are provided in the definitions section.

[0669] As mentioned above, a preferred method for modulating (preferably, increasing) expression of a nucleic acid encoding an ASR polypeptide is by introducing and expressing in a plant a nucleic acid encoding an ASR polypeptide; however the effects of performing the method, i.e. enhancing yield-related traits may also be achieved using other well known techniques, including but not limited to T-DNA activation tagging, TILLING, homologous recombination. A description of these techniques is provided in the definitions section.

[0670] The present invention also encompasses use of nucleic acids encoding ASR polypeptides as described herein and use of these ASR polypeptides in enhancing any of the aforementioned yield-related traits in plants.

[0671] Nucleic acids encoding ASR polypeptide described herein, or the ASR polypeptides themselves, may find use in breeding programmes in which a DNA marker is identified which may be genetically linked to an ASR polypeptide-encoding gene. The nucleic acids/genes, or the ASR polypeptides themselves may be used to define a molecular marker. This DNA or protein marker may then be used in breeding programmes to select plants having enhanced yield-related traits as defined hereinabove in the methods of the invention.

[0672] Allelic variants of an ASR polypeptide-encoding nucleic acid/gene may also find use in marker-assisted breeding programmes. Such breeding programmes sometimes require introduction of allelic variation by mutagenic treatment of the plants, using for example EMS mutagenesis; alternatively, the programme may start with a collection of allelic variants of so called “natural” origin caused unintentionally. Identification of allelic variants then takes place, for example, by PCR. This is followed by a step for selection of superior allelic variants of the sequence in question and which give increased yield. Selection is typically carried out by monitoring growth performance of plants containing different allelic variants of the sequence in question. Growth performance may be monitored in a greenhouse or in the field. Further optional steps include crossing plants in which the superior allelic variant was identified with another plant. This could be used, for example, to make a combination of interesting phenotypic features.

[0673] Nucleic acids encoding ASR polypeptides may also be used as probes for genetically and physically mapping the genes that they are a part of, and as markers for traits linked to those genes. Such information may be useful in plant breeding in order to develop lines with desired phenotypes. Such use of ASR polypeptide-encoding nucleic acids requires only a nucleic acid sequence of at least 15 nucleotides in length. The ASR polypeptide-encoding nucleic acids may be used as restriction fragment length polymorphism (RFLP) markers. Southern blots (Sambrook J, Fritsch E F and Maniatis T (1989) Molecular Cloning, A Laboratory Manual) of restriction-digested plant genomic DNA may be probed with the ASR-encoding nucleic acids. The resulting banding patterns may then be subjected to genetic analyses using computer programs such as MapMaker (Lander et al. (1987) Genomics 1: 174-181) in order to construct a genetic map. In addition, the nucleic acids may be used to probe Southern blots containing restriction endonuclease-treated genomic DNAs of a set of individuals representing parent and progeny of a defined genetic cross. Segregation of the DNA polymorphisms is noted and used to calculate the position of the ASR polypeptide-encoding nucleic acid in the genetic map previously obtained using this population (Botstein et al. (1980) Am. J. Hum. Genet. 32:314-331).

[0674] The production and use of plant gene-derived probes for use in genetic mapping is described in Bernatzky and Tanksley (1986) Plant Mol. Biol. Reporter 4: 37-41. Numerous publications describe genetic mapping of specific cDNA clones using the methodology outlined above or variations thereof. For example, F2 intercross populations, backcross populations, randomly mated populations, near isogenic lines, and other sets of individuals may be used for mapping. Such methodologies are well known to those skilled in the art.

[0675] The nucleic acid probes may also be used for physical mapping (i.e., placement of sequences on physical maps; see Hoheisel et al. In: Non-mammalian Genomic Analysis: A Practical Guide, Academic press 1996, pp. 319-346, and references cited therein).

[0676] In another embodiment, the nucleic acid probes may be used in direct fluorescence in situ hybridisation (FISH) mapping (Trask (1991) Trends Genet. 7:149-154). Although current methods of FISH mapping favour use of large clones (several kb to several hundred kb; see Laan et al. (1995) Genome Res. 5:13-20), improvements in sensitivity may allow performance of FISH mapping using shorter probes.

[0677] A variety of nucleic acid amplification-based methods for genetic and physical mapping may be carried out using the nucleic acids. Examples include allele-specific amplification (Kazazian (1989) J. Lab. Clin. Med. 11:95-96), polymorphism of PCR-amplified fragments (CAPS; Sheffield et al. (1993) Genomics 16:325-332), allele-specific ligation (Landegren et al. (1988) Science 241:1077-1080), nucleotide extension reactions (Sokolov (1990) Nucleic Acid Res. 18:3671), Radiation Hybrid Mapping (Walter et al. (1997) Nat. Genet. 7:22-28) and Happy Mapping (Dear and Cook (1989) Nucleic Acid Res. 17:6795-6807). For these methods, the sequence of a nucleic acid is used to design and produce primer pairs for use in the amplification reaction or in primer extension reactions. The design of such primers is well known to those skilled in the art. In methods employing PCR-based genetic mapping, it may be necessary to identify DNA sequence differences between the parents of the mapping cross in the region corresponding to the instant nucleic acid sequence. This, however, is generally not necessary for mapping methods.

[0678] The methods according to the present invention result in plants having enhanced yield-related traits, as described hereinbefore. These traits may also be combined with other economically advantageous traits, such as further yield-enhancing traits, tolerance to other abiotic and biotic stresses, traits modifying various architectural features and/or biochemical and/or physiological features.

### VII. Squamosa Promoter Binding Protein-Like 11 (SPL11) Transcription Factor Polypeptide

[0679] Surprisingly, it has now been found that modulating expression in a plant of a nucleic acid encoding a SPL11 polypeptide gives plants having enhanced yield-related traits relative to control plants. According to a first embodiment, the present invention provides a method for enhancing yield-related traits in plants relative to control plants, comprising modulating expression in a plant of a nucleic acid encoding a SPL11 polypeptide.

[0680] The present invention also provides hitherto unknown SPL11-encoding nucleic acids and SPL11 polypeptides. These sequences also being useful in performing the methods of the invention.

[0681] Therefore according to a further embodiment of the present invention there is provided an isolated nucleic acid molecule comprising:
[0682] (i) a nucleic acid represented by SEQ ID NO: 448;
[0683] (ii) the complement of a nucleic acid represented by SEQ ID NO: 448;
[0684] (iii) a nucleic acid encoding a SPL11 polypeptide having, in increasing order of preference, at least 70%, 75%, 80%, 85%, 90%, 95%, 96%, 97%, 98%, 99% or more sequence identity to the amino acid sequence represented by SEQ ID NO: 449, and having in increasing order of preference at least 70%, 75%, 80%, 85%, 90%, 95%, 96%, 97%, 98%, 99% or more sequence identity to SEQ ID NO: 465: SYCOVEGCRTDLSSAKDYHRKHRVCEPHSKAPKVVVAGLERRFC QQCSRFHGLAEFDQKKKSCRRRLNDHNARRRKPQPEAL (which represents the SBP domain in SEQ ID NO: 449);
[0685] (iv) a nucleic acid hybridising under stringent conditions to SEQ ID NO: 448.

[0686] Furthermore, there is also provided an isolated polypeptide comprising:
[0687] (i) an amino acid sequence represented by SEQ ID NO: 449;
[0688] (ii) an amino acid sequence having, in increasing order of preference, at least 70%, 75%, 80%, 85%, 90%, 95%, 96%, 97%, 98%, 99% or more sequence identity to the amino acid sequence represented by SEQ ID NO: 449, and having in increasing order of preference at least 70%, 75%, 80%, 85%, 90%, 95%, 96%, 97%, 98%, 99% or more sequence identity to SEQ ID NO: 465: SYCQVEGCRTDLSSAKDYHRKHRVCEPHSKAPKVVVAGLERRFCQQCSRFHG LAEFDQKKKSCRRRLNDHNARRRKPQPEAL (which represents the SBP domain in SEQ ID NO: 449).
[0689] (iii) derivatives of any of the amino acid sequences given in (i) or (ii) above.

[0690] A preferred method for modulating (preferably, increasing) expression of a nucleic acid encoding a SPL11 polypeptide is by introducing and expressing in a plant a nucleic acid encoding a SPL11 polypeptide.

[0691] Any reference hereinafter to a “protein useful in the methods of the invention” is taken to mean a SPL11 polypeptide as defined herein. Any reference hereinafter to a “nucleic acid useful in the methods of the invention” is taken to mean a nucleic acid capable of encoding such a SPL11 polypeptide. The nucleic acid to be introduced into a plant (and therefore useful in performing the methods of the invention) is any nucleic acid encoding the type of protein which will now be described, herein also named “SPL11 nucleic acid” or “SPL11 gene”.

[0692] A SPL11 polypeptide as defined herein refers to a polypeptide comprising a Squamosa Binding Protein (SBP) domain, such domain having in increasing order of preference at least 70%, 75%, 80%, 85%, 90%, 95%, 97% or more sequence identity to any one of the SBP domains as represented by SEQ ID NO: 456 to SEQ ID NO: 468 or SEQ ID NO: 478.

[0693] An “SPL11 polypeptide” as defined herein comprises the protein represented by SEQ ID NO: 448 which identical to SEQ ID NO: 172 and to homologues (orthologues and paralogues) thereof. Preferably, the homologues of SEQ ID NO: 172 have a DNA binding domain. SPL11 polypeptides can be found in specialized databases such as Pfam, (Finn et al. Nucleic Acids Research (2006) Database Issue 34:D247-D251). Pfam compiles a large collection of multiple sequence alignments and hidden Markov models (HMM) covering many common protein domains and families and is available through the Sanger Institute in the United Kingdom.

[0694] The gathering cutoff threshold of the SBP domain in the Pfam HMM_fs and Pfam HMM_ls models is 25.0. Trusted matches as considered in the Pfam database are those sequences scoring higher than the gathering cut-off threshold. However potential matches, comprising true SBP domains, may still fall under the gathering cut-off. Preferably a SPL11 polypeptide is a protein having one or more domains in their sequence that exceed the gathering cutoff of the Pfam protein domain family PF03110, known as SBP domain.

[0695] Alternatively, a SBP domain in a polypeptide may be identified by performing a sequence comparison with known polypeptides comprising a SBP domain and establishing the similarity in the region of the SBP domain. The sequences may be aligned using any of the methods well known in the art such as Blast algorithms. The probability for the alignment to occur with a given sequence is taken as basis for identifying similar polypeptides. A parameter that is typically used to represent such probability is called e-value. The E-value is a measure of the reliability of the S score. The S score is a measure of the similarity of the query to the sequence shown. The e-value describes how often a given S score is expected to occur at random. The e-value cut-off may be as high as 1.0. The typical threshold for a good e-value from a BLAST search output using an SPL11 polypeptide as query sequence can is lower than e⁵(=10⁻⁵), 1.e⁻¹⁵, 1.e⁻¹⁵, 1.e⁻²⁰, 1.e⁻²⁵, 1.e⁻⁵⁵, 1.e⁻⁷⁵, 1.e⁻¹⁰⁰, 1.e⁻²⁰⁰, 1.e⁻³⁰⁰, 1.e⁻⁴⁰⁰, 1.e⁻⁵⁰⁰, 1.e⁻⁶⁰⁰, 1.e⁻⁷⁰⁰ and 1.e⁻⁸⁰⁰. Preferably SPL11 polypeptides of the invention comprise a sequence having in increasing order of preference an e-value lower than e⁵(=10⁻⁵), 1.e⁻²⁰, 1.e⁻²⁵, 1.e⁻⁵⁰, 1.e⁻⁷⁵, 1.e⁻¹⁰⁰, 1.e⁻²⁰⁰, 1.e³⁰⁰, 1.e⁻⁴⁰⁰, 1.e⁻⁵⁰⁰, 1.e⁻⁶⁰⁰, 1.e⁻⁷⁰⁰ and 1.e⁻⁸⁰⁰ in an alignment with a SBP domain found in a known SPL11 polypeptide.

[0696] Examples of SPL11 polypeptides useful in the methods of the invention are given in Table G1. The amino acid coordinates of the SBP domain in the representative SPL11 protein of Table G1 are given in Table G4 and the domain sequence is represented by SEQ ID NO: 456 to SEQ ID NO: 468. A consensus sequence of the SBP domains present in SPL11 polypeptides is given in SEQ ID NO: 478.

[0697] Preferred SPL11 polypeptides of the invention are those having in increasing order of preference at least 70%, 75%, 80%, 85%, 90%, 95%, or more sequence identity to any of the polypeptides given in Table G2.

[0698] Typically SPL11 polypeptides may comprise in addition to the SBP domain one or more of the following conserved motifs at conserved positions in the sequence relative to the SBP domain: (i) Motif 1 as represented by SEQ ID NO: 469, (ii) Motif 2 is a serine rich region typically found at the N-terminal end of the SBP domain and can be represented by SEQ ID NO: 470; (iii) Motif 3 as presented by SEQ ID: 471 which is typically encoded by nucleotides comprised within the SPL11 polynucleotide region targeted by members of the miR156 microRNA family; (iv) Motif 4 as represented by SEQ ID NO: 472. FIG. 27 shows the conserved motifs and their relative position in the SPL11 polypeptide sequence represented by SEQ ID NO: 428.

[0699] Therefore, preferred SPL11 polypeptides useful in the method of the invention, comprise in addition to the SBP domain any one or more of the following conserved motifs:
[0700] (i) Motif 1 as represented by SEQ ID NO: 469 wherein any conservative amino acid substitution and/or 1 or 2 non conservative substitutions are allowed,
[0701] (ii) Motif 2 as represented by SEQ ID NO: 470 wherein any amino acid substitution is allowed, provided that at least 4 amino acids have a polar side chain, preferably serine or threonine, and provided that this motif is located at the N-terminal end of the SBP domain;
[0702] (iii) Motif 3 as represented by SEQ ID: 471, wherein 1 or 2 mismatches are allowed;
[0703] (iv) Motif 4 as represented by SEQ ID: 472, wherein 1, 2 or 3 mismatches are allowed.

[0704] Examples of conservative amino acid substitutions are given in the background section. Typically amino acids comprised in polypeptides are alpha amino acids having an amine and a carboxyl group attached to the same carbon, the alpha carbon, which amino acid molecules often comprise a side chain attached to the alpha carbon. Table 3 shows the classification of amino acids based on the physical and biochemical properties of the side chain.

TABLE 3

Classification of amino acids according to the
side chain properties.

| | | | | | |
|---|---|---|---|---|---|
| | | | Side chain | Side chain acidity | Hydropathy |
| Amino Acid | 3-Letter | 1-Letter | polarity | or basicity | index |

| | | | | | |
|---|---|---|---|---|---|
| Arginine | Arg | R | polar | basic | −4.5 |
| Asparagine | Asn | N | polar | neutral | −3.5 |
| Aspartic acid | Asp | D | polar | acidic | −3.5 |
| Cysteine | Cys | C | polar | neutral | 2.5 |
| Glutamic acid | Glu | E | polar | acidic | −3.5 |
| Glutamine | Gln | Q | polar | neutral | −3.5 |
| Histidine | His | H | polar | basic | −3.2 |
| Lysine | Lys | K | polar | basic | −3.9 |
| Serine | Ser | S | polar | neutral | −0.8 |
| Threonine | Thr | T | polar | neutral | −0.7 |
| Tyrosine | Tyr | Y | polar | neutral | −1.3 |
| Alanine | Ala | A | nonpolar | neutral | 1.8 |
| Glycine | Gly | G | nonpolar | neutral | −0.4 |
| Isoleucine | Ile | I | nonpolar | neutral | 4.5 |
| Leucine | Leu | L | nonpolar | neutral | 3.8 |
| Methionine | Met | M | nonpolar | neutral | 1.9 |
| Phenylalanine | Phe | F | nonpolar | neutral | 2.8 |
| Proline | Pro | P | nonpolar | neutral | −1.6 |
| Tryptophan | Trp | W | nonpolar | neutral | −0.9 |
| Valine | Val | V | nonpolar | neutral | 4.2 |

[0705] Examples of SPL11 polypeptides comprising one or more of the conserved motifs Motif 1 to Motif 4 are given in Example 62. FIG. 28 shows the position of the conserved motifs in those SPL11 polypeptides.

[0706] Preferably, the SPL11 polypeptide of the invention when used in the construction of a phylogenetic tree, such as the one depicted in FIG. 29, clusters within the 33 group comprising the amino acid sequence represented by SEQ ID NO: 428 (named AtSPL11 in FIG. 29) rather than with any other group.

[0707] The term “domain” and “motif” is defined in the “definitions” section herein. Specialist databases exist for the identification of domains, for example, SMART (Schultz et al. (1998) Proc. Natl. Acad. Sci. USA 95, 5857-5864; Letunic et al. (2002) Nucleic Acids Res 30, 242-244, interPro (Mulder et al., (2003) Nucl. Acids. Res. 31, 315-318, Prosite (Bucher and Bairoch (1994), A generalized profile syntax for biomolecular sequences motifs and its function in automatic sequence interpretation. (In) ISMB-94; Proceedings 2nd International Conference on Intelligent Systems for Molecular Biology. Altman R., Brutlag D., Karp P., Lathrop R., Searls D., Eds., pp 53-61, AAAI Press, Menlo Park; Hub et al., Nucl. Acids. Res. 32:D134-D137, (2004), or Pram (Bateman et al., Nucleic Acids Research 30(1): 276-280 (2002). A set of tools for in silico analysis of protein sequences is available on the ExPASy proteomics server (Swiss Institute of Bioinformatics (Gasteiger et al., ExPASy: the proteomics server for in-depth protein knowledge and analysis, Nucleic Acids Res. 31:3784-3788 (2003)). Domains may also be identified using routine techniques, such as by sequence alignment.

[0708] Methods for the alignment of sequences for comparison are well known in the art, such methods include GAP, BESTFIT, BLAST, FASTA and TFASTA. GAP uses the algorithm of Needleman and Wunsch ((1970) J Mol Biol 48: 443-453) to find the global (i.e. spanning the complete sequences) alignment of two sequences that maximizes the number of matches and minimizes the number of gaps. The BLAST algorithm (Altschul et al. (1990) J Mol Biol 215: 403-10) calculates percent sequence identity and performs a statistical analysis of the similarity between the two sequences. The software for performing BLAST analysis is publicly available through the National Centre for Biotechnology Information (NCBI). Homologues may readily be identified using, for example, the ClustalW multiple sequence alignment algorithm (version 1.83), with the default pairwise alignment parameters, and a scoring method in percentage. Global percentages of similarity and identity may also be determined using one of the methods available in the MatGAT software package (Campanella et al., BMC Bioinformatics. 2003 Jul. 10; 4:29. MatGAT: an application that generates similarity/identity matrices using protein or DNA sequences.). Minor manual editing may be performed to optimise alignment between conserved motifs, as would be apparent to a person skilled in the art. Furthermore, instead of using full-length sequences for the identification of homologues, specific domains may also be used. The sequence identity values may be determined over the entire nucleic acid or amino acid sequence or over selected domains or conserved motif(s), using the programs mentioned above using the default parameters.

[0709] Furthermore, SPL11 polypeptides (at least in their native form) may typically have DNA binding activity, in particular they may bind DNA fragments comprising the SBP domain DNA binding box as represented by SEQ ID NO: 49. Typically the SBP domain DNA binding box is found in gene promoters of plant origin such as the SQUAMOSA gene. Fragments comprising the SBP domain DNA binding box are preferably more than 10, 15, 20, 25, 100, 200, 500, 1000, 2000 base pairs long. Methods to determine DNA binding of SBP domain containing proteins are applicable to SPL11 polypeptides and are known in the art (Klein at al. Mol Gen Genet. 1996, 15; 250(1):7-16; Yamasaki et al. 2004 J Mol. Biol. 2004, 12; 337(1):49-63).

[0710] Preferred SPL11 polypeptides of the invention are those having DNA binding activity, more preferably those binding a DNA fragment comprising SEQ ID NO: 475.

[0711] The present invention is illustrated by transforming plants with the nucleic acid sequence represented by SEQ ID NO: 427, encoding the polypeptide sequence of SEQ ID NO: 428. However, performance of the invention is not restricted to these sequences; the methods of the invention may advantageously be performed using any SPL11 encoding nucleic acid or SPL11 polypeptide as defined herein.

[0712] Examples of nucleic acids encoding SPL11 polypeptides are given in Table G1 of Example 62 herein. Such nucleic acids are useful in performing the methods of the invention. The amino acid sequences given in Table G1 of Example 62 are example sequences of orthologues and paralogues of the SPL11 polypeptide represented by SEQ ID NO: 428, the terms “orthologues” and “paralogues” being as defined herein. Further orthologues and paralogues may readily be identified by performing a so-called reciprocal blast search. Typically, this involves a first BLAST involving BLASTing a query sequence (for example using any of the sequences listed in Table G1 of Example 62) against any sequence database, such as the publicly available NCBI database. BLASTN or TBLASTX (using standard default values) are generally used when starting from a nucleotide sequence, and BLASTP or TBLASTN (using standard default values) when starting from a protein sequence. The BLAST results may optionally be filtered. The full-length sequences of either the filtered results or non-filtered results are then BLASTed back (second BLAST) against sequences from the organism from which the query sequence is derived (where the query sequence is SEQ ID NO: 427 or SEQ ID NO: 428, the second BLAST would therefore be against Arabidopsis sequences). The results of the first and second BLASTs are then compared. A paralogue is identified if a high-ranking hit from the first blast is from the same species as from which the query sequence is derived, a BLAST back then ideally results in the query sequence amongst the highest hits; an orthologue is identified if a high-ranking hit in the first BLAST is not from the same species as from which the query sequence is derived, and preferably results upon BLAST back in the query sequence being among the highest hits.

[0713] High-ranking hits are those having a low E-value. The lower the E-value, the more significant the score (or in other words the lower the chance that the hit was found by chance). Computation of the E-value is well known in the art. In addition to E-values, comparisons are also scored by percentage identity. Percentage identity refers to the number of identical nucleotides (or amino acids) between the two compared nucleic acid (or polypeptide) sequences over a particular length. In the case of large families, ClustalW may be used, followed by a neighbour joining tree, to help visualize clustering of related genes and to identify orthologues and paralogues.

[0714] Nucleic acid variants may also be useful in practising the methods of the invention. Examples of such variants include nucleic acids encoding homologues and derivatives of any one of the amino acid sequences given in Table G1 of Example 62, the terms “homologue” and “derivative” being as defined herein. Also useful in the methods of the invention are nucleic acids encoding homologues and derivatives of orthologues or paralogues of any one of the amino acid sequences given in Table G1 of Example 62. Homologues and derivatives useful in the methods of the present invention have substantially the same biological and functional activity as the unmodified protein from which they are derived.

[0715] Further nucleic acid variants useful in practising the methods of the invention include portions of nucleic acids encoding SPL11 polypeptides, nucleic acids hybridising to nucleic acids encoding SPL11 polypeptides, splice variants of nucleic acids encoding SPL11 polypeptides, allelic variants of nucleic acids encoding SPL11 polypeptides and variants of nucleic acids encoding SPL11 polypeptides obtained by gene shuffling. The terms hybridising sequence, splice variant, allelic variant and gene shuffling are as described herein.

[0716] A preferred nucleic acid variant useful in practising the methods of the invention is a nucleic acid encoding a SPL11 polypeptide, which is microRNA insensitive, further preferably the nucleic acid is insensitive to microRNAs belonging to the miR156 family. MicroRNAs target nucleic acids (RNA in particular) for destruction typically causing a reduction or inhibition of the accumulation of the targeted RNA. Targeting requires hybridisation between the microRNA and the targeted nucleic acid (RNA) in a very specific region, called the miR (microRNA) target site, which comprises a sequence complementary to a portion of the mature microRNA gene. Typically microRNA insensitive nucleic acids comprise a sequence having in increasing order of preference 1, 2, 3, 4, 5 or more mismatches in an alignment to the relevant microRNA molecule in the miR target site. MicroRNA insensitive nucleic acids may accumulated in a cell to levels in increasing order of preference 5, 10, 20, 30, 40, 50 times or higher than the corresponding nucleic acid targeted by the relevant MicroRNA, which typically comprises 100% sequence complementary in the miR target site.

[0717] The miR156 family has been described earlier and a compilation of the microRNAs including the miR156 family members can be found at miRBase database (Griffiths-Jones et al. 2006 Nucleic Acids Research, 2006, Vol. 34, Database issue 0140-D144). The miRBase database is maintained by the The Wellcome Trust Sanger Institute, in Cambridge, UK. The miR156 target site in a SPL11 nucleic acid is complementary to the mature sequence of miR156 microRNAs. An example of mature sequences of the miR156 family members from rice and their corresponding target sites on rice SPL nucleic acids is given in FIG. 30 A. FIG. 31B shows an alignment of representative SPL11 nucleic acids (in DNA form), in which the target site of miR156 in the corresponding ribonucleic acids is indicated. An example of a miR156 insensitive SPL11 nucleic acid encoding SEQ ID NO: 428 is represented by SEQ ID NO: 431. Further examples of miR156 insensitive SPL11 nucleic acids are represented by SEQ ID 440 and SEQ ID NO: 454, the latter lacking the miR156 target site.

[0718] Preferably a SPL11 nucleic acid useful in the methods of the invention has 1, 2, 3, 4 or more mismatches in the miR156 target site or lack the target site of the miR156 gene. Examples of such SPL11 nucleic acids are given in FIG. 31B. Further preferably is a nucleic acid as represented by SEQ ID NO: 431, SEQ ID 440 and SEQ ID NO: 454.

[0719] Nucleic acids encoding SPL11 polypeptides need not be full-length nucleic adds, since performance of the methods of the invention does not rely on the use of full-length nucleic acid sequences. According to the present invention, there is provided a method for enhancing yield-related traits in plants, comprising introducing and expressing in a plant a portion of any one of the nucleic acid sequences given in Table G1 of Example 62, or a portion of a nucleic acid encoding an orthologue, paralogue or homologue of any of the amino acid sequences given in Table G1 of Example 62.

[0720] A portion of a nucleic acid may be prepared, for example, by making one or more deletions to the nucleic acid. The portions may be used in isolated form or they may be fused to other coding (or non-coding) sequences in order to, for example, produce a protein that combines several activities. When fused to other coding sequences, the resultant polypeptide produced upon translation may be bigger than that predicted for the protein portion.

[0721] Portions useful in the methods of the invention, encode a SPL11 polypeptide as defined herein, and have substantially the same biological activity as the amino acid sequences given in Table G1 of Example 62. Preferably, the portion is a portion of any one of the nucleic acids given in Table G1 of Example 62, or is a portion of a nucleic acid encoding an orthologue or paralogue of any one of the amino acid sequences given in Table G1 of Example 62. Preferably the portion is at least 70, 100, 200, 500, 550, 600, 650, 700, 750, 800, 850, 900, 950, 1000, 1500, 2000, 2500, 3000, 3500, 4000, 4500, 5000 consecutive nucleotides in length, the consecutive nucleotides being of any one of the nucleic acid sequences given in Table G1 of Example 62, or of a nucleic acid encoding an orthologue or paralogue of any one of the amino acid sequences given in Table G1 of Example 62. Preferably the portion encodes at least an SBP domain. Most preferably the portion is a portion of the nucleic acid of SEQ ID NO: 427. Preferably, the portion encodes an amino acid sequence which when used in the construction of a phylogenetic tree, such as the one depicted in FIG. 29, clusters with the group of SPL11 polypeptides comprising the amino acid sequence represented by SEQ ID NO: 428 (AtSPL11) rather than with any other group.

[0722] Another nucleic acid variant useful in the methods of the invention is a nucleic acid capable of hybridising, under reduced stringency conditions, preferably under stringent conditions, with a nucleic acid encoding a SPL11 polypeptide as defined herein, or with a portion as defined herein.

[0723] According to the present invention, there is provided a method for enhancing yield-related traits in plants, comprising introducing and expressing in a plant a nucleic acid capable of hybridizing to any one of the nucleic acids given in Table G1 of Example 62, or comprising introducing and expressing in a plant a nucleic acid capable of hybridising to a nucleic acid encoding an orthologue, paralogue or homologue of any of the nucleic acid sequences given in Table G1 of Example 62.

[0724] Hybridising sequences useful in the methods of the invention encode a SPL11 polypeptide as defined herein, and have substantially the same biological activity as the amino acid sequences given in Table G1 of Example 62. Preferably, the hybridising sequence is capable of hybridising to any one of the nucleic acids given in Table G1 of Example 62, or to a portion of any of these sequences, a portion being as defined above, or wherein the hybridising sequence is capable of hybridising to a nucleic acid encoding an orthologue or paralogue of any one of the amino acid sequences given in Table G1 of Example 62. Most preferably, the hybridising sequence is capable of hybridising to a nucleic acid as represented by SEQ ID NO: 427 or to a portion thereof.

[0725] Preferably, the hybridising sequence encodes an amino acid sequence which when used in the construction of a phylogenetic tree, such as the one depicted in FIG. 29, clusters with the group of SPL11 polypeptides comprising the amino acid sequence represented by SEQ ID NO: 428 (AtSPL11) rather than with any other group.

[0726] Another nucleic acid variant useful in the methods of the invention is a splice variant encoding a SPL11 polypeptide as defined hereinabove, a splice variant being as defined herein.

[0727] According to the present invention, there is provided a method for enhancing yield-related traits in plants, comprising introducing and expressing in a plant a splice variant of any one of the nucleic acid sequences given in Table G1 of Example 62, or a splice variant of a nucleic acid encoding an orthologue, paralogue or homologue of any of the amino acid sequences given in Table G1 of Example 62. Examples of spliced variants of the gene encoding SEQ ID NO: 428 are represented by SEQ ID NO: 427; SEQ ID NO: 429 and SEQ ID NO: 430.

[0728] Preferred splice variants are splice variants of a nucleic acid represented by SEQ ID NO: 427, or a splice variant of a nucleic acid encoding an orthologue or paralogue of SEQ ID NO: 428. Preferably, the amino acid sequence encoded by the splice variant, when used in the construction of a phylogenetic tree, such as the one depicted in FIG. 29, clusters with the group of SPL11 polypeptides comprising the amino acid sequence represented by SEQ ID NO: 428 (AtSPL11) rather than with any other group.

[0729] Another nucleic acid variant useful in performing the methods of the invention is an allelic variant of a nucleic acid encoding a SPL11 polypeptide as defined hereinabove, an allelic variant being as defined herein.

[0730] According to the present invention, there is provided a method for enhancing yield-related traits in plants, comprising introducing and expressing in a plant an allelic variant of any one of the nucleic acids given in Table G1 of Example 62, or comprising introducing and expressing in a plant an allelic variant of a nucleic acid encoding an orthologue, paralogue or homologue of any of the amino acid sequences given in Table G1 of Example 62.

[0731] The allelic variants useful in the methods of the present invention have substantially the same biological activity as the SPL11 polypeptide of SEQ ID NO: 428 and any of the amino acids depicted in Table G1 of Example 62. Allelic variants exist in nature, and encompassed within the methods of the present invention is the use of these natural alleles. Preferably, the allelic variant is an allelic variant of SEQ ID. NO: 427 or an allelic variant of a nucleic acid encoding an orthologue or paralogue of SEQ ID NO: 428. Preferably, the amino acid sequence encoded by the allelic variant, when used in the construction of a phylogenetic tree, such as the one depicted in FIG. 29, clusters with the SPL11 polypeptides comprising the amino acid sequence represented by SEQ ID NO: 428 (AtSPL11) rather than with any other group.

[0732] Gene shuffling or directed evolution may also be used to generate variants of nucleic acids encoding SPL11 polypeptides as defined above; the term “gene shuffling” being as defined herein.

[0733] According to the present invention, there is provided a method for enhancing yield-related traits in plants, comprising introducing and expressing in a plant a variant of any one of the nucleic acid sequences given in Table G1 of Example 62, or comprising introducing and expressing in a plant a variant of a nucleic acid encoding an orthologue, paralogue or homologue of any of the amino acid sequences given in Table G1 of Example 62, which variant nucleic acid is obtained by gene shuffling.

[0734] Preferably, the amino acid sequence encoded by the variant nucleic acid obtained by gene shuffling, when used in the construction of a phylogenetic tree such as the one depicted in FIG. 29, clusters with the group of SPL11 polypeptides comprising the amino acid sequence represented by SEQ ID NO: 428 (AtSPL11) rather than with any other group.

[0735] Furthermore, nucleic acid variants may also be obtained by site-directed mutagenesis. Several methods are available to achieve site-directed mutagenesis, the most common being PCR based methods (Current Protocols in Molecular Biology. Wiley Eds.).

[0736] Nucleic acids encoding SPL11 polypeptides may be derived from any natural or artificial source. The nucleic acid may be modified from its native form in composition and/or genomic environment through deliberate human manipulation. Preferably the SPL11 polypeptide-encoding nucleic acid is from a plant, further preferably from a dicotyledonous plant, more preferably from the family Brassicaceae, most preferably the nucleic acid is from Arabidopsis thaliana.

[0737] Performance of the methods of the invention gives plants having enhanced yield-related traits. In particular performance of the methods of the invention gives plants having increased yield, especially increased seed yield relative to control plants. The terms “yield” and “seed yield” are described in more detail in the “definitions” section herein.

[0738] Reference herein to enhanced yield-related traits is taken to mean an increase in biomass (weight) of one or more parts of a plant, which may include aboveground (harvestable) parts and/or (harvestable) parts below ground. In particular, such harvestable parts are seeds, and performance of the methods of the invention results in plants having increased yield relative to the yield of control plants.

[0739] Taking corn as an example, a yield increase may be manifested as one or more of the following: increase in the number of plants established per hectare or acre, an increase in the number of ears per plant, an increase in the number of rows, number of kernels per row, kernel weight, thousand kernel weight, ear length/diameter, increase in the seed filling rate (which is the number of filled seeds divided by the total number of seeds and multiplied by 100), among others. Taking rice as an example, a yield increase may manifest itself as an increase in one or more of the following: number of plants per hectare or acre, number of panicles per plant, number of spikelets per panicle, number of flowers (florets) per panicle (which is expressed as a ratio of the number of filled seeds over the number of primary panicles), increase in the seed filling rate (which is the number of filled seeds divided by the total number of seeds and multiplied by 100), increase in thousand kernel weight, among others.

[0740] The present invention provides a method for increasing yield, especially seed yield of plants, relative to control plants, which method comprises modulating expression, preferably increasing expression, in a plant of a nucleic acid encoding a SPL11 polypeptide as defined herein.

[0741] Since the transgenic plants according to the present invention have increased yield, it is likely that these plants exhibit an increased growth rate (during at least part of their life cycle), relative to the growth rate of control plants at a corresponding stage in their life cycle.

[0742] The increased growth rate may be specific to one or more parts of a plant (including seeds), or may be throughout substantially the whole plant. Plants having an increased growth rate may have a shorter life cycle. The life cycle of a plant may be taken to mean the time needed to grow from a dry mature seed up to the stage where the plant has produced dry mature seeds, similar to the starting material. This life cycle may be influenced by factors such as early vigour, growth rate, greenness index, flowering time and speed of seed maturation. The increase in growth rate may take place at one or more stages in the life cycle of a plant or during substantially the whole plant life cycle. Increased growth rate during the early stages in the life cycle of a plant may reflect enhanced vigour. The increase in growth rate may alter the harvest cycle of a plant allowing plants to be sown later and/or harvested sooner than would otherwise be possible (a similar effect may be obtained with earlier flowering time). If the growth rate is sufficiently increased, it may allow for the further sowing of seeds of the same plant species (for example sowing and harvesting of rice plants followed by sowing and harvesting of further rice plants all within one conventional growing period). Similarly, if the growth rate is sufficiently increased, it may allow for the further sowing of seeds of different plants species (for example the sowing and harvesting of corn plants followed by, for example, the sowing and optional harvesting of soybean, potato or any other suitable plant). Harvesting additional times from the same rootstock in the case of some crop plants may also be possible. Altering the harvest cycle of a plant may lead to an increase in annual biomass production per acre (due to an increase in the number of times (say in a year) that any particular plant may be grown and harvested). An increase in growth rate may also allow for the cultivation of transgenic plants in a wider geographical area than their wild-type counterparts, since the territorial limitations for growing a crop are often determined by adverse environmental conditions either at the time of planting (early season) or at the time of harvesting (late season). Such adverse conditions may be avoided if the harvest cycle is shortened. The growth rate may be determined by deriving various parameters from growth curves, such parameters may be: T-Mid (the time taken for plants to reach 50% of their maximal size) and T-90 (time taken for plants to reach 90% of their maximal size), amongst others.

[0743] According to a preferred feature of the present invention, performance of the methods of the invention gives plants having an increased growth rate relative to control plants. Therefore, according to the present invention, there is provided a method for increasing the growth rate of plants, which method comprises modulating expression, preferably increasing expression, in a plant of a nucleic acid encoding a SPL11 polypeptide as defined herein.

[0744] An increase in yield and/or growth rate occurs whether the plant is under non-stress conditions or whether the plant is exposed to various stresses compared to control plants. Plants typically respond to exposure to stress by growing more slowly. In conditions of severe stress, the plant may even stop growing altogether. Mild stress on the other hand is defined herein as being any stress to which a plant is exposed which does not result in the plant ceasing to grow altogether without the capacity to resume growth. Mild stress in the sense of the invention leads to a reduction in the growth of the stressed plants of less than 40%, 35% or 30%, preferably less than 25%, 20% or 15%, more preferably less than 14%, 13%, 12%, 11% or 10% or less in comparison to the control plant under non-stress conditions. Due to advances in agricultural practices (irrigation, fertilization, pesticide treatments) severe stresses are not often encountered in cultivated crop plants. As a consequence, the compromised growth induced by mild stress is often an undesirable feature for agriculture. Mild stresses are the everyday biotic and/or abiotic (environmental) stresses to which a plant is exposed. Abiotic stresses may be due to drought or excess water, anaerobic stress, salt stress, chemical toxicity, oxidative stress and hot, cold or freezing temperatures. The abiotic stress may be an osmotic stress caused by a water stress (particularly due to drought), salt stress, oxidative stress or an ionic stress. Biotic stresses are typically those stresses caused by pathogens, such as bacteria, viruses, fungi and insects.

[0745] In particular, the methods of the present invention may be performed under non-stress conditions or under conditions of mild drought to give plants having increased yield relative to control plants. As reported in Wang at al. (Planta (2003) 218: 1-14), abiotic stress leads to a series of morphological, physiological, biochemical and molecular changes that adversely affect plant growth and productivity. Drought, salinity, extreme temperatures and oxidative stress are known to be interconnected and may induce growth and cellular damage through similar mechanisms. Rabbani et al. (Plant Physiol (2003) 133: 1755-1767) describes a particularly high degree of “cross talk” between drought stress and high-salinity stress. For example, drought and/or salinisation are manifested primarily as osmotic stress, resulting in the disruption of homeostasis and ion distribution in the cell. Oxidative stress, which frequently accompanies high or low temperature, salinity or drought stress, may cause denaturing of functional and structural proteins. As a consequence, these diverse environmental stresses often activate similar cell signalling pathways and cellular responses, such as the production of stress proteins, up-regulation of anti-oxidants, accumulation of compatible solutes and growth arrest. The term “non-stress” conditions as used herein are those environmental conditions that allow optimal growth of plants. Persons skilled in the art are aware of normal soil conditions and climatic conditions for a given location. Plants with optimal growth conditions, (grown under non-stress conditions) typically yield in increasing order of preference at least 90%, 87%, 85%, 83%, 80%, 77% or 75% of the average production of such plant in a given environment. Average production may be calculated on harvest and/or season basis. Persons skilled in the art are aware of average yield productions of a crop.

[0746] Performance of the methods of the invention gives plants grown under non-stress conditions or under mild drought conditions increased yield relative to control plants grown under comparable conditions. Therefore, according to the present invention, there is provided a method for increasing yield in plants grown under non-stress conditions or under mild drought conditions, which method comprises increasing expression in a plant of a nucleic acid encoding a SPL11 polypeptide.

[0747] Performance of the methods of the invention gives plants grown under conditions of nutrient deficiency, particularly under conditions of nitrogen deficiency, increased yield relative to control plants grown under comparable conditions. Therefore, according to the present invention, there is provided a method for increasing yield in plants grown under conditions of nutrient deficiency, which method comprises increasing expression in a plant of a nucleic acid encoding a SPLIT polypeptide. Nutrient deficiency may result from a lack or excess of nutrients such as nitrogen, phosphates and other phosphorous-containing compounds, potassium, calcium, cadmium, magnesium, manganese, iron and boron, amongst others.

[0748] The present invention encompasses plants or parts thereof (including seeds) obtainable by the methods according to the present invention. The plants or parts thereof comprise a nucleic acid transgene encoding a SPL11 polypeptide as defined above.

[0749] The invention also provides genetic constructs and vectors to facilitate introduction and/or expression in plants of nucleic acids encoding SPL11 polypeptides. The gene constructs may be inserted into vectors, which may be commercially available, suitable for transforming into plants and suitable for expression of the gene of interest in the transformed cells. The invention also provides use of a gene construct as defined herein in the methods of the invention.

[0750] More specifically, the present invention provides a construct comprising:
[0751] (a) a nucleic acid encoding a SPL11 polypeptide as defined above;
[0752] (b) one or more control sequences capable of driving expression of the nucleic acid sequence of (a); and optionally
[0753] (c) a transcription termination sequence.

[0754] Preferably, the nucleic acid encoding a SPL11 polypeptide is as defined above. The term “control sequence” and “termination sequence” are as defined herein.

[0755] Plants are transformed with a vector comprising any of the nucleic acids described above. The skilled artisan is well aware of the genetic elements that must be present on the vector in order to successfully transform, select and propagate host cells containing the sequence of interest. The sequence of interest is operably linked to one or more control sequences (at least to a promoter).

[0756] Advantageously, any type of promoter, whether natural or synthetic, may be used to drive expression of the nucleic acid sequence. A constitutive promoter is particularly useful in the methods. See the “Definitions” section herein for definitions of the various promoter types.

[0757] It should be clear that the applicability of the present invention is not restricted to the SPL11 polypeptide-encoding nucleic acid represented by SEQ ID NO: 427, nor is the applicability of the invention restricted to expression of a SPL11 polypeptide-encoding nucleic acid when driven by a constitutive promoter.

[0758] The constitutive promoter is preferably a GOS2 promoter, preferably a GOS2 promoter from rice. Further preferably the constitutive promoter is represented by a nucleic acid sequence substantially similar to SEQ ID NO: 476, most preferably the constitutive promoter is as represented by SEQ ID NO: 476. See the “Definitions” section herein for further examples of constitutive promoters.

[0759] In an alternative embodiment, a seed specific promoter is used. The seed specific promoter is preferably ABA (abcisic acid) inducible, it is preferably the WSI18 promoter, preferably the WSI18 from rice. Further preferably the constitutive promoter is represented by a nucleic acid sequence substantially similar to SEQ ID NO: 477. See the “Definitions” section herein for further examples of seed specific promoters.

[0760] It should be clear that the promoters useful in the methods of the invention are not limited to those specified in the abovementioned embodiments.

[0761] Optionally, one or more terminator sequences may be used in the construct introduced into a plant. Additional regulatory elements may include transcriptional as well as translational enhancers. Those skilled in the art will be aware of terminator and enhancer sequences that may be suitable for use in performing the invention. An intron sequence may also be added to the 5′ untranslated region (UTR) or in the coding sequence to increase the amount of the mature message that accumulates in the cytosol, as described in the definitions section. Other control sequences (besides promoter, enhancer, silencer, intron sequences, 3′UTR and/or 5′UTR regions) may be protein and/or RNA stabilizing elements. Such sequences would be known or may readily be obtained by a person skilled in the art.

[0762] The genetic constructs of the invention may further include an origin of replication sequence that is required for maintenance and/or replication in a specific cell type. One example is when a genetic construct is required to be maintained in a bacterial cell as an episomal genetic element (e.g. plasmid or cosmid molecule). Preferred origins of replication include, but are not limited to, the f1-ori and colE1.

[0763] For the detection of the successful transfer of the nucleic acid sequences as used in the methods of the invention and/or selection of transgenic plants comprising these nucleic acids, it is advantageous to use marker genes (or reporter genes). Therefore, the genetic construct may optionally comprise a selectable marker gene. Selectable markers are described in more detail in the “definitions” section herein.

[0764] It is known that upon stable or transient integration of nucleic acids into plant cells, only a minority of the cells takes up the foreign DNA and, if desired, integrates it into its genome, depending on the expression vector used and the transfection technique used. To identify and select these integrants, a gene coding for a selectable marker (such as the ones described above) is usually introduced into the host cells together with the gene of interest. These markers can for example be used in mutants in which these genes are not functional by, for example, deletion by conventional methods. Furthermore, nucleic acid molecules encoding a selectable marker can be introduced into a host cell on the same vector that comprises the sequence encoding the polypeptides of the invention or used in the methods of the invention, or else in a separate vector. Cells which have been stably transfected with the introduced nucleic acid can be identified for example by selection (for example, cells which have integrated the selectable marker survive whereas the other cells die). The marker genes may be removed or excised from the transgenic cell once they are no longer needed. Techniques for marker gene removal are known in the art, useful techniques are described above in the definitions section.

[0765] The invention also provides a method for the production of transgenic plants having enhanced yield-related traits relative to control plants, comprising introduction and expression in a plant of any nucleic acid encoding a SPL11 polypeptide as defined hereinabove.

[0766] More specifically, the present invention provides a method for the production of transgenic plants having increased enhanced yield-related traits, particularly increased (seed) yield, which method comprises:
[0767] (i) introducing and expressing in a plant or plant cell a SPL11 polypeptide-encoding nucleic acid; and
[0768] (ii) cultivating the plant cell under conditions promoting plant growth and development.

[0769] The nucleic acid of (i) may be any of the nucleic acids capable of encoding a SPL11 polypeptide as defined herein.

[0770] The nucleic acid may be introduced directly into a plant cell or into the plant itself (including introduction into a tissue, organ or any other part of a plant). According to a preferred feature of the present invention, the nucleic acid is preferably introduced into a plant by transformation. The term “transformation” is described in more detail in the “definitions” section herein.

[0771] The genetically modified plant cells can be regenerated via all methods with which the skilled worker is familiar. Suitable methods can be found in the abovementioned publications by S. D. Kung and R. Wu, Potrykus or Höfgen and Willmitzer.

[0772] Generally after transformation, plant cells or cell groupings are selected for the presence of one or more markers which are encoded by plant-expressible genes co-transferred with the gene of interest, following which the transformed material is regenerated into a whole plant. To select transformed plants, the plant material obtained in the transformation is, as a rule, subjected to selective conditions so that transformed plants can be distinguished from untransformed plants. For example, the seeds obtained in the above-described manner can be planted and, after an initial growing period, subjected to a suitable selection by spraying. A further possibility consists in growing the seeds, if appropriate after sterilization, on agar plates using a suitable selection agent so that only the transformed seeds can grow into plants. Alternatively, the transformed plants are screened for the presence of a selectable marker such as the ones described above.

[0773] Following DNA transfer and regeneration, putatively transformed plants may also be evaluated, for instance using Southern analysis, for the presence of the gene of interest, copy number and/or genomic organisation. Alternatively or additionally, expression levels of the newly introduced DNA may be monitored using Northern and/or Western analysis, both techniques being well known to persons having ordinary skill in the art.

[0774] The generated transformed plants may be propagated by a variety of means, such as by clonal propagation or classical breeding techniques. For example, a first generation (or T1) transformed plant may be selfed and homozygous second-generation (or T2) transformants selected, and the T2 plants may then further be propagated through classical breeding techniques. The generated transformed organisms may take a variety of forms. For example, they may be chimeras of transformed cells and non-transformed cells; clonal transformants (e.g., all cells transformed to contain the expression cassette); grafts of transformed and untransformed tissues (e.g., in plants, a transformed rootstock grafted to an untransformed scion).

[0775] The present invention clearly extends to any plant cell or plant produced by any of the methods described herein, and to all plant parts and propagules thereof. The present invention extends further to encompass the progeny of a primary transformed or transfected cell, tissue, organ or whole plant that has been produced by any of the aforementioned methods, the only requirement being that progeny exhibit the same genotypic and/6r phenotypic characteristic(s) as those produced by the parent in the methods according to the invention.

[0776] The invention also includes host cells containing an isolated nucleic acid encoding a SPL11 polypeptide as defined hereinabove. Preferred host cells according to the invention are plant cells. Host plants for the nucleic acids or the vector used in the method according to the invention, the expression cassette or construct or vector are, in principle, advantageously all plants, which are capable of synthesizing the polypeptides used in the inventive method.

[0777] The methods of the invention are advantageously applicable to any plant. Plants that are particularly useful in the methods of the invention include all plants which belong to the superfamily Viridiplantae, in particular monocotyledonous and dicotyledonous plants including fodder or forage legumes, ornamental plants, food crops, trees or shrubs. According to a preferred embodiment of the present invention, the plant is a crop plant. Examples of crop plants include soybean, sunflower, canola, alfalfa, rapeseed, cotton, tomato, potato and tobacco. Further preferably, the plant is a monocotyledonous plant. Examples of monocotyledonous plants include sugarcane. More preferably the plant is a cereal. Examples of cereals include rice, maize, wheat, barley, millet, rye, triticale, sorghum and oats.

[0778] The invention also extends to harvestable parts of a plant such as, but not limited to seeds, leaves, fruits, flowers, stems, roots, rhizomes, tubers and bulbs. The invention furthermore relates to products derived, preferably directly derived, from a harvestable part of such a plant, such as dry pellets or powders, oil, fat and fatty acids, starch or proteins.

[0779] According to a preferred feature of the invention, the modulated expression is increased expression. Methods for increasing expression of nucleic acids or genes, or gene products, are well documented in the art and examples are provided in the definitions section.

[0780] As mentioned above, a preferred method for modulating (preferably, increasing) expression of a nucleic acid encoding a SPL11 polypeptide is by introducing and expressing in a plant a nucleic acid encoding a SPL11 polypeptide; however the effects of performing the method, i.e. enhancing yield-related traits may also be achieved using other well known techniques, including but not limited to T-DNA activation tagging, TILLING, homologous recombination. A description of these techniques is provided in the definitions section.

[0781] The present invention also encompasses use of nucleic acids encoding SPL11 polypeptides as described herein and use of these SPL11 polypeptides in enhancing any of the aforementioned yield-related traits in plants.

[0782] Nucleic acids encoding SPL11 polypeptides described herein, or the SPL11 polypeptides themselves, may find use in breeding programmes in which a DNA marker is identified, which may be genetically linked to a SPL11 polypeptide-encoding gene. The nucleic acids/genes, or the SPL11 polypeptides themselves may be used to define a molecular marker. This DNA or protein marker may then be used in breeding programmes to select plants having enhanced yield-related traits as defined hereinabove in the methods of the invention.

[0783] Allelic variants of a SPL11 polypeptide-encoding nucleic acid/gene may also find use in marker-assisted breeding programmes. Such breeding programmes sometimes require introduction of allelic variation by mutagenic treatment of the plants, using for example EMS mutagenesis; alternatively, the programme may start with a collection of allelic variants of so called “natural” origin caused unintentionally. Identification of allelic variants then takes place, for example, by PCR. This is followed by a step for selection of superior allelic variants of the sequence in question and which give increased yield. Selection is typically carried out by monitoring growth performance of plants containing different allelic variants of the sequence in question. Growth performance may be monitored in a greenhouse or in the field. Further optional steps include crossing plants in which the superior allelic variant was identified with another plant. This could be used, for example, to make a combination of interesting phenotypic features.

[0784] Nucleic acids encoding SPL11 polypeptides may also be used as probes for genetically and physically mapping the genes that they are a part of, and as markers for traits linked to those genes. Such information may be useful in plant breeding in order to develop lines with desired phenotypes. Such use of SPL11 polypeptide-encoding nucleic acids requires only a nucleic acid sequence of at least 15 nucleotides in length. The SPL11 polypeptide-encoding nucleic acids may be used as restriction fragment length polymorphism (RFLP) markers. Southern blots (Sambrook J, Fritsch E F and Maniatis T (1989) Molecular Cloning, A Laboratory Manual) of restriction-digested plant genomic DNA may be probed with the SPL11-encoding nucleic acids. The resulting banding patterns may then be subjected to genetic analyses using computer programs such as MapMaker (Lander et. al. (1987) Genomics 1: 174-181) in order to construct a genetic map. In addition, the nucleic acids may be used to probe Southern blots containing restriction endonuclease-treated genomic DNAs of a set of individuals representing parent and progeny of a defined genetic cross. Segregation of the DNA polymorphisms is noted and used to calculate the position of the SPL11 polypeptide-encoding nucleic acid in the genetic map previously obtained using this population (Botstein et al. (1980) Am. J. Hum. Genet. 32:314-331).

[0785] The production and use of plant gene-derived probes for use in genetic mapping is described in Bernatzky and Tanksley (1986) Plant MeI. Biol. Reporter 4: 37-41. Numerous publications describe genetic mapping of specific cDNA clones using the methodology outlined above or variations thereof. For example, F2 intercross populations, backcross populations, randomly mated populations, near isogenic lines, and other sets of individuals may be used for mapping. Such methodologies are well known to those skilled in the art.

[0786] The nucleic acid probes may also be used for physical mapping (i.e., placement of sequences on physical maps; see Hoheisel et al. In: Non-mammalian Genomic Analysis: A Practical Guide, Academic press 1996, pp. 319-346, and references cited therein).

[0787] In another embodiment, the nucleic acid probes may be used in direct fluorescence in situ hybridisation (FISH) mapping (Trask (1991) Trends Genet. 7:149-154). Although current methods of FISH mapping favour use of large clones (several kb to several hundred kb; see Laan et al. (1995) Genome Res. 5:13-20), improvements in sensitivity may allow performance of FISH mapping using shorter probes.

[0788] A variety of nucleic acid amplification-based methods for genetic and physical mapping may be carried out using the nucleic acids. Examples include allele-specific amplification (Kazazian (1989) J. Lab. Clin. Med. 11:95-96), polymorphism of PCR-amplified fragments (CAPS; Sheffield et al. (1993) Genomics 16:325-332), allele-specific ligation (Landegren et al. (1988) Science 241:1077-1080), nucleotide extension reactions (Sokolov (1990) Nucleic Acid Res. 18:3671), Radiation Hybrid Mapping (Walter et al. (1997) Nat. Genet. 7:22-28) and Happy Mapping (Dear and Cook (1989) Nucleic Acid Res. 17:6795-6807). For these methods, the sequence of a nucleic acid is used to design and produce primer pairs for use in the amplification reaction or in primer extension reactions. The design of such primers is well known to those skilled in the art. In methods employing PCR-based genetic mapping, it may be necessary to identify DNA sequence differences between the parents of the mapping cross in the region corresponding to the instant nucleic acid sequence. This, however, is generally not necessary for mapping methods.

[0789] The methods according to the present invention result in plants having enhanced yield-related traits, as described hereinbefore. These traits may also be combined with other economically advantageous traits, such as further yield-enhancing traits, tolerance to other abiotic and biotic stresses, traits modifying various architectural features and/or biochemical and/or physiological features.

[0790] The present invention will now be described in reference to the following items:
[0791] 1. A method for enhancing yield-related traits in plants relative to control plants, comprising modulating expression in a plant of a nucleic acid encoding an LBD polypeptide, wherein said LBD polypeptide comprises a DUF206 domain.
[0792] 2. Method according to item 1, wherein said LBD polypeptide comprises one or more of the following motifs:

| | |
|---|---|
| (i) Motif 1: MSCNGCRXLRKGCX, | (SEQ ID NO: 5) |
| (ii) Motif 2: QXXATXFXAKFXGR, | (SEQ ID NO: 6) |
| (iii) Motif 3: FXSLLXEAXG | (SEQ ID NO: 7) |

[0793] 3. Method according to item 1 or 2, wherein said modulated expression is effected by introducing and expressing in a plant a nucleic acid encoding a LBD polypeptide.
[0794] 4. Method according to any preceding item, wherein said nucleic acid encoding a LBD polypeptide encodes any one of the proteins listed in Table A1 or is a portion of such a nucleic acid, or a nucleic acid capable of hybridising with such a nucleic acid.
[0795] 5. Method according to any preceding item, wherein said nucleic acid sequence encodes an orthologue or paralogue of any of the proteins given in Table A1.
[0796] 6. Method according to any preceding item, wherein said enhanced yield-related traits comprise increased yield, preferably increased biomass and/or increased seed yield relative to control plants.
[0797] 7. Method according to any one of items 1 to 6, wherein said enhanced yield-related traits are obtained under non-stress conditions.
[0798] 8. Method according to any one of items 1 to 6, wherein said enhanced yield-related traits are obtained under conditions of nitrogen deficiency.
[0799] 9. Method according to any one of items 3 to 8, wherein said nucleic acid is operably linked to a constitutive promoter, preferably to a GOS2 promoter, most preferably to a GOS2 promoter from rice.
[0800] 10. Method according to any preceding item, wherein said nucleic acid encoding a LBD polypeptide is of plant origin, preferably from a dicotyledonous plant, further preferably from the family Brassicaceae, more preferably from the genus Arabidopsis, most preferably from Arabidopsis thaliana.
[0801] 11. An isolated nucleic acid molecule comprising any one of the following features:
   [0802] (i) a nucleic acid represented by SEQ ID NO: 69;
   [0803] (ii) a nucleic acid or fragment thereof that is complementary to any one of the SEQ ID NOs given in (i);
   [0804] (iii) a nucleic acid encoding a LBD polypeptide having, in increasing order of preference, at least 60%, 65%, 70%, 75%, 80%, 85%, 90%, 95%, 96%, 97%, 98%, 99% or more sequence identity to SEQ ID NO: 70;
   [0805] (iv) a nucleic acid capable of hybridizing under stringent conditions to any one of the nucleic acids given in (i), (ii) or (iii) above.
[0806] 12. An isolated polypeptide comprising:
   [0807] (i) an amino acid sequence having, in increasing order of preference, at least 60%, 65%, 70%, 75%, 80%, 85%, 90%, 95%, 96%, 97%, 98%, 99% or 100% sequence identity to the amino acid sequence given in SEQ ID NO: 70.
   [0808] (ii) derivatives of any of the amino acid sequences given in (I).
[0809] 13. Plant or part thereof, including seeds, obtainable by a method according to any preceding item, wherein said plant or part thereof comprises a recombinant nucleic acid encoding an LBD polypeptide.
[0810] 14. Construct comprising:
   [0811] (i) nucleic acid encoding an LBD polypeptide as defined in items 1, 2 or 12;
   [0812] (ii) one or more control sequences capable of driving expression of the nucleic acid sequence of (a); and optionally
   [0813] (iii) a transcription termination sequence.
[0814] 15. Construct according to item 14, wherein one of said control sequences is a constitutive promoter, preferably a GOS2 promoter, most preferably a GOS2 promoter from rice.
[0815] 16. Use of a construct according to item 14 or 15 in a method for making plants having increased yield, particularly increased biomass and/or increased seed yield relative to control plants.
[0816] 17. Plant, plant part or plant cell transformed with a construct according to item 14 or 15.
[0817] 18. Method for the production of a transgenic plant having increased yield, particularly increased biomass and/or increased seed yield relative to control plants, comprising:
   [0818] (i) introducing and expressing in a plant a nucleic acid encoding an LBD polypeptide as defined in item 1, 2 or 12; and
   [0819] (ii) cultivating the plant cell under conditions promoting plant growth and development.
[0820] 19. Transgenic plant having increased yield, particularly increased biomass and/or increased seed yield, relative to control plants, resulting from increased expression of a nucleic acid encoding an LBD polypeptide as defined in item 1, 2 or 12, or a transgenic plant cell derived from said transgenic plant.
[0821] 20. Transgenic plant according to item 13, 17 or 19, or a transgenic plant cell derived thereof, wherein said plant is a crop plant or a monocot or a cereal, such as rice, maize, wheat, barley, millet, rye, triticale, sorghum and oats.
[0822] 21. Harvestable parts of a plant according to item 19, wherein said harvestable parts are preferably shoot biomass and/or seeds.
[0823] 22. Products derived from a plant according to item 19 and/or from harvestable parts of a plant according to item 20.
[0824] 23. Use of a nucleic acid encoding an LBD polypeptide in increasing yield, particularly in increasing seed yield and/or shoot biomass in plants, relative to control plants.
[0825] 24. A method for enhancing yield-related traits in plants relative to control plants, comprising modulating expression in a plant of a nucleic acid encoding a JMJC polypeptide, wherein said JMJC polypeptide comprises a JmjC domain.
[0826] 25. Method according to item 24 wherein said JmjC domain is represented by a sequence having in increasing order of preference at least 50%, 55%, 60%, 65%, 70%, 75%, 80%, 85%, 90%, 95%, or more sequence identity to:
   [0827] (i) SEQ ID NO: 78; and/or
   [0828] (ii) one of the JmjC domains comprised in the JMJC polypeptides represented by SEQ ID NO: 84; SEQ ID NO: 86; SEQ ID NO: 96; SEQ ID NO: 98; SEQ ID NO: 104; SEQ ID NO: 108; SEQ ID NO: 110; SEQ ID NO: 112; SEQ ID NO: 114; SEQ ID NO: 116; SEQ ID NO: 118; SEQ ID NO: 120; SEQ ID NO: 122; SEQ ID NO: 124; SEQ ID NO: 128; SEQ ID NO: 130; SEQ ID NO: 132; and SEQ ID NO: 134, whose amino acid coordinates are given in Table B4
[0829] 26. Method according to item 24 and item 25, wherein said JMJC polypeptide comprising a motif having in increasing order of preference at least 50%, 55%, 60%, 65%, 70%, 75%, 80%, 85%, 90%, 95% or more sequence identity to any of:
   [0830] (i) SEQ ID NO: 79,
   [0831] (ii) SEQ ID NO: 80,
   [0832] (iii) SEQ ID NO: 81,
   [0833] (iv) SEQ ID NO: 82;
[0834] 27. Method according to item 24 or 26, wherein said modulated expression is effected by introducing and expressing in a plant a nucleic acid encoding a JMJC polypeptide.
[0835] 28. Method according to any one of items 24 to 27, wherein said modulating expression is an increase in the expression.
[0836] 29. Method according to any one of items 24 to 28, wherein said nucleic acid encoding a JMJC polypeptide encodes any one of the proteins listed in Table B1 or is a portion of such a nucleic acid, or a nucleic acid capable of hybridising with such a nucleic acid.
[0837] 30. Method according to one of items 24 to 29, wherein said nucleic acid sequence encodes an orthologue or paralogue of any of the proteins given in Table B1.
[0838] 31. Method according to item 30, wherein said nucleic acid encodes SEQ ID NO: 74.
[0839] 32. Method according to any one of items 24 to 31, wherein said enhanced yield-related traits comprise increased yield, preferably increased harvest index and/or seed yield relative to control plants.
[0840] 33. Method according to any one of items 24 to 32, wherein said enhanced yield-related traits comprise plant early vigour relative to control plants.
[0841] 34. Method according to any one of items 24 to 33, wherein said enhanced yield-related traits are obtained under non-stress conditions.
[0842] 35. Method according to any one of items 24 to 33, wherein said enhanced yield-related traits are obtained under mild drought stress growth conditions.
[0843] 36. Method according to any one of items 24 to 33, wherein said enhanced yield-related traits are obtained under growth conditions of nitrogen deficiency.
[0844] 37. Method according to any one of items 27 to 36, wherein said nucleic acid is operably linked to a constitutive promoter, preferably to a GOS2 promoter, most preferably to a GOS2 promoter from rice.
[0845] 38. Method according to any one of items 24 to 37, wherein said nucleic acid encoding a JMJC polypeptide is of plant origin, preferably from a dicotyledonous plant, further preferably from the family Brassicaceae, more preferably from the genus Arabidopsis, most preferably from Arabidopsis thaliana.
[0846] 39. Plant or part thereof, including seeds, obtainable by a method according to any one of items 24 to 38, wherein said plant or part thereof comprises a recombinant nucleic acid encoding a JMJC polypeptide.
[0847] 40. Construct comprising:
   [0848] (i) nucleic acid encoding a JMJC polypeptide as defined in items 24 to 26;
   [0849] (ii) one or more control sequences capable of driving expression of the nucleic acid sequence of (i); and optionally
   [0850] (iii) a transcription termination sequence.
[0851] 41. Construct according to item 40, wherein one of said control sequences is a constitutive promoter, preferably a GOS2 promoter, most preferably a GOS2 promoter from rice.
[0852] 42. Use of a construct according to item 40 or 41 in a method for making plants having increased yield related traits, particularly plant early vigour and/or increased seed yield relative to control plants.
[0853] 43. Plant, plant part or plant cell transformed with a construct according to item 40 or 41.
[0854] 44. Method for the production of a transgenic plant having increased yield related traits, particularly plant early vigour and/or increased seed yield relative to control plants, comprising:
   [0855] (i) introducing and expressing in a plant a nucleic acid encoding a JMJC polypeptide as defined in item 24 to 26; and
   [0856] (ii) cultivating the plant cell under conditions promoting plant growth and development.
[0857] 45. Transgenic plant having increased yield, particularly increased plant seedling vigour and/or increased seed yield, relative to control plants, resulting from increased expression of a nucleic acid encoding a JMJC polypeptide as defined in item 24 to 26, or a transgenic plant cell derived from said transgenic plant.
[0858] 46. Transgenic plant according to item 39, 43 or 45, or a transgenic plant cell derived thereof, wherein said plant is a crop plant or a monocot or a cereal, such as rice, maize, wheat, barley, millet, rye, triticale, sorghum and oats.
[0859] 47. Harvestable parts of a plant according to item 46, wherein said harvestable parts are preferably shoot biomass and/or seeds.
[0860] 48. Products derived from a plant according to item 46 and/or from harvestable parts of a plant according to item 47.
[0861] 49. Use of a nucleic acid encoding a JMJC polypeptide in increasing yield, particularly in increasing seed yield and/or shoot biomass in plants, relative to control plants.
[0862] 50. An isolated nucleic acid molecule comprising any one of the following features:
   [0863] (i) a nucleic acid represented by SEQ ID NO: 169;
   [0864] (ii) a nucleic acid or fragment thereof that is complementary to SEQ ID NO: 169;
   [0865] (iii) a nucleic acid encoding an JMJC polypeptide having, in increasing order of preference, at least 70%, 75%, 80%, 85%, 90%, 95%, 96%, 97%, 98%, 99% or more sequence identity to the amino acid sequence given in SEQ ID NO: 170;
   [0866] (iv) a nucleic acid capable of hybridizing under stringent conditions to any one of the nucleic acids given in (i), (ii) or (iii) above.
[0867] 51. An isolated polypeptide molecule comprising:
   [0868] (i) an amino acid sequence having, in increasing order of preference, at least 70%, 75%, 80%, 85%, 90%, 95%, 96%, 97%, 98%, 99% or 100% or more sequence identity to the amino acid sequence given in SEQ ID NO: 170;
   [0869] (ii) derivatives of any of the amino acid sequences given in (i).
[0870] 52. A method for enhancing yield-related traits in plants relative to control plants, comprising modulating expression in a plant of a nucleic acid encoding a Casein kinase I (CKI) wherein said CKI is selected from SEQ ID NO: 174 or an orthologue or paralogue thereof.
[0871] 53. Method according to item 52, wherein said modulated expression is effected by introducing and expressing in a plant a nucleic acid encoding said CKI polypeptide.
[0872] 54. Method according to item 52 or 53, wherein said nucleic acid encoding said CKI polypeptide is a portion of SEQ ID NO: 173, or a nucleic acid capable of hybridising with such a nucleic acid.
[0873] 55. Method according to any one of items 52 to 54, wherein said nucleic acid sequence encodes SEQ ID NO: 174.
[0874] 56. Method according to any one of items 52 to 55, wherein said enhanced yield-related traits comprise increased early vigour and/or increased yield, preferably increased biomass and/or increased seed yield relative to control plants.
[0875] 57. Method according to any one of items 52 to 56, wherein said enhanced yield-related traits are obtained under non-stress conditions.
[0876] 58. Method according to any one of items 52 to 56, wherein said enhanced yield-related traits are obtained under abiotic stress conditions.
[0877] 59. Method according to item 58, wherein said abiotic stress conditions are selected from one or more of: conditions of drought stress, conditions of salt stress, and conditions of nitrogen deficiency.
[0878] 60. Method according to any one of items 53 to 59, wherein said nucleic acid is operably linked to a seed-specific promoter.
[0879] 61. Method according to any one of items 53 to 60, wherein said seed-specific promoter is a WSI18 promoter, preferably to a WSI18 promoter from rice.
[0880] 62. Method according to any one of items 52 to 61, wherein said nucleic acid encoding a CKI polypeptide is of plant origin.
[0881] 63. Method according to any one of items 52 to 62, wherein said plant origin is from preferably a dicotyledonous plant, further preferably from the family Solanaceae, more preferably from the genus Nicotiana tabacum.
[0882] 64. Plant or part thereof, including seeds, obtainable by a method according to any one of items 52 to 63, wherein said plant or part thereof comprises a recombinant nucleic acid encoding a CKI polypeptide.
[0883] 65. Construct comprising:
   [0884] (i) nucleic acid encoding a CKI polypeptide as defined in item 52;
   [0885] (ii) one or more control sequences capable of driving expression of the nucleic acid sequence of (a); and optionally
   [0886] (iii) a transcription termination sequence.
[0887] 66. Construct according to item 65, wherein one of said control sequences is a seed specific promoter, preferably a WSI18 promoter.
[0888] 67. Construct according to item 65, wherein one of said seed specific promoter is a WSI18 promoter, most preferably a WSI18 promoter from rice.
[0889] 68. Use of a construct according to any of items 65 to 67 in a method for making plants having increased yield-related traits, particularly increased early vigour, increased biomass and/or increased seed yield relative to control plants.
[0890] 69. Plant, plant part or plant cell transformed with a construct according to any of items 65 to 67.
[0891] 70. Method for the production of a transgenic plant having increased yield, particularly increased biomass and/or increased seed yield relative to control plants, comprising:
   [0892] (i) introducing and expressing in a plant a nucleic acid encoding a CKI polypeptide as defined in item 52; and
   [0893] (ii) cultivating the plant cell under conditions promoting plant growth and development.
[0894] 71. Transgenic plant having increased yield-related traits, particularly increased early vigour, increased biomass and/or increased seed yield, relative to control plants, resulting from increased expression of a nucleic acid encoding a CKI polypeptide as defined in item 52, or a transgenic plant cell derived from said transgenic plant.
[0895] 72. Transgenic plant according to item 64, 69 or 71, or a transgenic plant cell derived thereof, wherein said plant is a crop plant or a monocot or a cereal, such as rice, maize, wheat, barley, millet, rye, triticale, sorghum and oats.
[0896] 73. Harvestable parts of a plant according to item 72, wherein said harvestable parts are preferably shoot biomass and/or seeds.
[0897] 74. Products derived from a plant according to item 72 and/or from harvestable parts of a plant according to item 73.
[0898] 75. Use of a nucleic acid encoding a CKI polypeptide in increasing yield-related traits, particularly in increasing one or more of early vigour, seed yield and shoot biomass in plants, relative to control plants.
[0899] 76. A method for enhancing yield-related traits, preferably enhancing seed-yield related-traits, in plants relative to control plants, comprising modulating, preferably increasing, expression in a plant of a nucleic acid sequence encoding a plant homeodomain finger-homeodomain (PHDf-HD) polypeptide, which PHDf-HD polypeptide comprises: (i) a domain having at least 25%, 30%, 35%, 40%, 45%, 50%, 55%, 60%, 65%, 70%, 75%, 80%, 85%, 90%, 95%, 98%, 99% or more amino acid sequence identity to a leucine zipper/plant homeodomain finger (ZIP/PHDf) domain as represented by SEQ ID NO: 233; and (ii) a domain having at least 25%, 30%, 35%, 40%, 45%, 50%, 55%, 60%, 65%, 70%, 75%, 80%, 85%, 90%, 95%, 98%, 99% or more amino acid sequence identity to a homeodomain (HD) as represented by SEQ ID NO: 234, and optionally selecting for plants having enhanced yield-related traits.
[0900] 77. Method according to item 76, wherein said PHDf-HD polypeptide comprises: (i) a PHD domain as represented by PFAM00628; and (ii) an HD as represented by PFAM00046.
[0901] 78. Method according to item 76 or 77, wherein said PHDf-HD polypeptide, when used in the construction of a HD phylogenetic tree, such as the one depicted in FIG. 13, clusters with the PHDf-HD group of polypeptides comprising the polypeptide sequence as represented by SEQ ID NO: 180, rather than with any other HD group.
[0902] 79. Method according to any one of items 76 to 78, wherein said PHDf-HD polypeptide has in increasing order of preference at least 30%, 35%, 40%, 45%, 50%, 55%, 60%, 65%, 70%, 75%, 80%, 85%, 90%, 95%, 98%, 99% or more sequence identity to the PHDf-HD polypeptide as represented by SEQ ID NO: 180 or to any of the polypeptide sequences given in Table D1 herein.
[0903] 80. Method according to any one of items 76 to 79, wherein said nucleic acid sequence encoding a PHDf-HD polypeptide is represented by any one of the nucleic acid sequence SEQ ID NOs given in Table D1 or a portion thereof, or a sequence capable of hybridising with any one of the nucleic acid sequences SEQ ID NOs given in Table D1.
[0904] 81. Method according to any one of items 76 to 80, wherein said nucleic acid sequence encodes an orthologue or paralogue of any of the SEQ ID NOs given in Table D1.
[0905] 82. Method according to any one of items 76 to 81, wherein said modulated, preferably increased, expression is effected by any one or more of: T-DNA activation tagging, TILLING, or homologous recombination.
[0906] 83. Method according to any one of items 76 to 82, wherein said increased expression is effected by introducing and expressing in a plant a nucleic acid sequence encoding a PHDf-HD polypeptide.
[0907] 84. Method according to any one of items 76 to 83, wherein said yield-related traits are seed yield-related traits, comprising one or more of: (i) increased number of primary panicle; (ii) increased total seed weight per plant; (iii) increased number of (filled) seeds; (iv) increased TKW; or (v) increased harvest index.
[0908] 85. Method according to any one of items 76 to 84, wherein said nucleic acid sequence is operably linked to a constitutive promoter, preferably to a plant constitutive promoter, more preferably to a GOS2 promoter, most preferably to a GOS2 promoter from rice.
[0909] 86. Method according to any one of items 76 to 85, wherein said nucleic acid sequence encoding a PHDf-HD polypeptide is of plant origin, preferably from a monocotyledonous plant, further preferably from the family Poacae more preferably from the genus Oryza, most preferably from Oryza sativa.
[0910] 87. Plants, parts thereof (including seeds), or plant cells obtainable by a method according to any one of items 76 to 86, wherein said plant, part or cell thereof comprises an isolated nucleic acid transgene encoding a PHDf-HD polypeptide operably linked to a plant constitutive promoter.
[0911] 88. Construct comprising:
   [0912] (i) A nucleic acid sequence encoding a PHDf-HD polypeptide as defined in any one of items 76 to 81;
   [0913] (ii) one or more control sequences capable of driving expression of the nucleic acid sequence of (i); and optionally
   [0914] (iii) a transcription termination sequence.
   [0915] wherein at least one of the control sequences is a plant constitutive promoter, preferably a GOS2 promoter.
[0916] 89. Use of a construct according to items 87 in a method for making plants having enhanced yield-related traits relative to control plants, which enhanced yield-related traits, preferably enhanced seed yield-related traits, are one or more of: (i) increased number of primary panicle; (ii) increased total seed weight per plant; (iii) increased number of (filled) seeds; (iv) increased TKW; or (v) increased harvest index.
[0917] 90. Plant, plant part or plant cell transformed with a construct according to item 87 or 88.
[0918] 91. Method for the production of transgenic plants having enhanced yield-related traits relative to control plants, comprising:
   [0919] (i) introducing and expressing in a plant, plant part, or plant cell, a nucleic acid sequence encoding a PHDf-HD polypeptide as defined in any one of items 76 to 81, under the control of plant constitutive promoter; and
   [0920] (ii) cultivating the plant cell under conditions promoting plant growth and development.
[0921] 92. Transgenic plant having enhanced yield-related traits, preferably enhanced seed yield-related traits, relative to control plants, resulting from modulated, preferably increased, expression of a nucleic acid sequence encoding a PHDf-HD polypeptide as defined in any one of items 76 to 81, operably linked to a plant constitutive promoter, or a transgenic plant cell derived from said transgenic plant.
[0922] 93. Transgenic plant according to item 87, 90 or 92, wherein said plant is a crop plant or a monocot or a cereal, such as rice, maize, wheat, barley, millet, rye, triticale, sorghum and oats, or a transgenic plant cell derived from said transgenic plant.
[0923] 94. Harvestable parts comprising a nucleic acid sequence encoding a PHDf-HD polypeptide of a plant according to item 93, wherein said harvestable parts are preferably seeds.
[0924] 95. Products derived from a plant according to item 93 and/or from harvestable parts of a plant according to item 94.
[0925] 96. Use of a nucleic acid sequence encoding a PHDf-HD polypeptide as defined in any one of items 76 to 81 in enhancing yield-related traits in plants, preferably in enhancing seed yield-related traits, comprising one or more of: (i) increased number of primary panicles; (ii) increased total seed weight per plant; (iii) increased number of (filled) seeds; (iv) increased TKW; or (v) increased harvest index.
[0926] 97. An isolated nucleic acid molecule comprising any one of the following features:
   [0927] (i) a nucleic acid represented by SEQ ID NO: 242;
   [0928] (ii) a nucleic acid or fragment thereof that is complementary to SEQ ID NO: 242;
   [0929] (iii) a nucleic acid encoding an JMJC polypeptide having, in increasing order of preference, at least 70%, 75%, 80%, 85%, 90%, 95%, 96%, 97%, 98%, 99% or more sequence identity to the amino acid sequence given in SEQ ID NO: 243;
   [0930] (iv) a nucleic acid capable of hybridizing under stringent conditions to any one of the nucleic acids given in (i), (ii) or (iii) above.
[0931] 98. An isolated polypeptide molecule comprising:
   [0932] (i) an amino acid sequence having, in increasing order of preference, at least 70%, 75%, 80%, 85%, 90%, 95%, 96%, 97%, 98%, 99% or 100% or more sequence identity to the amino acid sequence given in SEQ ID NO: 243;
   [0933] (ii) derivatives of any of the amino acid sequences given in (i).
[0934] 99. A method for enhancing yield-related traits in plants relative to control plants, comprising modulating expression in a plant of a nucleic acid encoding a bHLH11-like polypeptide, wherein said bHLH-11 like polypeptide comprises a Helix-Loop-Helix domain.
[0935] 100. Method according to item 99, wherein said bHLH11-like polypeptide comprises one or more of the following motifs:
   [0936] (i) Motif 1 (SEQ ID NO: 246);
   [0937] (ii) Motif 2 (SEQ ID NO: 247);
   [0938] (iii) Motif 3 (SEQ ID NO: 248);
   [0939] (iv) Motif 4 (SEQ ID NO: 249);
   [0940] (v) Motif 5 (SEQ ID NO: 250);
   [0941] (vi) Motif 6 (SEQ ID NO: 251);
   [0942] (vii) Motif 7 (SEQ ID NO: 252).
[0943] 101. Method according to item 99 or 100, wherein said modulated expression is effected by introducing and expressing in a plant a nucleic acid encoding a bHLH11-like polypeptide.
[0944] 102. Method according to any one of items 99 to 101, wherein said nucleic acid encoding a bHLH11-like polypeptide encodes any one of the proteins listed in Table E1 or is a portion of such a nucleic acid, or a nucleic acid capable of hybridising with such a nucleic acid.
[0945] 103. Method according to any one of items 99 to 102, wherein said nucleic acid sequence encodes an orthologue or paralogue of any of the proteins given in Table E1.
[0946] 104. Method according to any one of items 99 to 103, wherein said enhanced yield-related traits comprise increased yield, preferably increased seed yield relative to control plants.
[0947] 105. Method according to any one of items 99 to 104, wherein said enhanced yield-related traits are obtained under non-stress conditions.
[0948] 106. Method according to any one of items 101 to 105, wherein said nucleic acid is operably linked to a constitutive promoter, preferably to a GOS2 promoter, most preferably to a GOS2 promoter from rice.
[0949] 107. Method according to any one of items 99 to 106, wherein said nucleic acid encoding a bHLH11-like polypeptide is of plant origin, preferably from a monocotyledonous plant, further preferably from the family Poaceae, more preferably from the genus Triticum, most preferably from Triticum aestivum.
[0950] 108. Plant or part thereof, including seeds, obtainable by a method according to any one of items 99 to 107, wherein said plant or part thereof comprises a recombinant nucleic acid encoding a bHLH11-like polypeptide.
[0951] 109. Construct comprising:
   [0952] (i) nucleic acid encoding a bHLH11-like polypeptide as defined in items 99 or 100;
   [0953] (ii) one or more control sequences capable of driving expression of the nucleic acid sequence of (i); and optionally
   [0954] (iii) a transcription termination sequence.
[0955] 110. Construct according to item 109, wherein one of said control sequences is a constitutive promoter, preferably a GOS2 promoter, most preferably a GOS2 promoter from rice.
[0956] 111. Use of a construct according to item 109 or 110 in a method for making plants having increased yield, particularly increased seed yield relative to control plants.
[0957] 112. Plant, plant part or plant cell transformed with a construct according to item 109 or 110.
[0958] 113. Method for the production of a transgenic plant having increased yield, particularly increased seed yield relative to control plants, comprising:
   [0959] (i) introducing and expressing in a plant a nucleic acid encoding a bHLH11-like polypeptide as defined in item 99 or 100; and
   [0960] (ii) cultivating the plant cell under conditions promoting plant growth and development.
[0961] 114. Transgenic plant having increased yield, particularly increased seed yield, relative to control plants, resulting from modulated expression of a nucleic acid encoding a bHLH11-like polypeptide as defined in item 99 or 100, or a transgenic plant cell derived from said transgenic plant.
[0962] 115. Transgenic plant according to item 108, 112 or 114, or a transgenic plant cell derived thereof, wherein said plant is a crop plant or a monocot or a cereal, such as rice, maize, wheat, barley, millet, rye, triticale, sorghum emmer, spelt, secale, einkorn, teff, milo and oats.
[0963] 116. Harvestable parts of a plant according to item 115, wherein said harvestable parts are preferably seeds.
[0964] 117. Products derived from a plant according to item 115 and/or from harvestable parts of a plant according to item 116.
[0965] 118. Use of a nucleic acid encoding a bHLH11-like polypeptide in increasing yield, particularly in increasing seed yield in plants, relative to control plants.
[0966] 119. A method for enhancing yield-related traits in plants relative to control plants, comprising modulating expression in a plant of a nucleic acid encoding an ASR, wherein said ASR is represented by SEQ ID NO: 397 or an orthologue or paralogue thereof.
[0967] 120. Method according to item 119, wherein said modulated expression is effected by introducing and expressing in a plant a nucleic acid encoding said ASR polypeptide.
[0968] 121. Method according to item 119 or 120, wherein said nucleic acid encoding said ASR polypeptide is a portion of SEQ ID NO: 396, or a nucleic acid capable of hybridising with such a nucleic acid.
[0969] 122. Method according to any one of items 119 to 121, wherein said nucleic acid sequence encodes SEQ ID NO: 397, or an orthologue or paralogue thereof.
[0970] 123. Method according to any one of items 119 to 122, wherein said enhanced yield-related traits comprise increased yield, preferably increased seed yield relative to control plants.
[0971] 124. Method according to any one of items 119 to 123, wherein said enhanced yield-related traits are obtained under non-stress conditions.
[0972] 125. Method according to any one of items 120 to 124, wherein said nucleic acid is operably linked to a constitutive promoter, preferably to a GOS2 promoter, most preferably to a GOS2 promoter from rice.
[0973] 126. Method according to any one of items 119 to 125, wherein said nucleic acid encoding an ASR polypeptide is of plant origin, preferably from a dicotyledonous plant, further preferably from the family Poaceae, more preferably from the genus Oryza, most preferably from Oryza sativa.
[0974] 127. Plant or part thereof, including seeds, obtainable by a method according to any one of items 119 to 126, wherein said plant or part thereof comprises a recombinant nucleic acid encoding an ASR polypeptide.
[0975] 128. Construct comprising:
   [0976] (i) nucleic acid encoding an ASR polypeptide as defined in item 119 or any one of SEQ ID NO: 401, 403, 405, 407, 409, 411, 413, 415 and 417;
   [0977] (ii) one or more control sequences capable of driving expression of the nucleic acid sequence of (a); and optionally
   [0978] (iii) a transcription termination sequence.
[0979] 129. Construct according to item 128, wherein one of said control sequences is a constitutive promoter, preferably a GOS2 promoter, most preferably a GOS2 promoter from rice.
[0980] 130. Use of a construct according to any of items 128 or 129 in a method for making plants having increased yield-related traits, particularly increased seed yield relative to control plants.
[0981] 131. Plant, plant part or plant cell transformed with a construct according to any of items 128 or 129.
[0982] 132. Method for the production of a transgenic plant having increased yield, particularly increased biomass and/or increased seed yield relative to control plants, comprising:
   [0983] (i) introducing and expressing in a plant a nucleic acid encoding an ASR polypeptide as defined in item 119; and
   [0984] (ii) cultivating the plant cell under conditions promoting plant growth and development.
[0985] 133. Transgenic plant having increased yield-related traits, particularly increased seed yield, relative to control plants, resulting from increased expression of a nucleic acid encoding an ASR polypeptide as defined in item 119, or a transgenic plant cell derived from said transgenic plant.
[0986] 134. Transgenic plant according to item 127, 131 or 133, or a transgenic plant cell derived thereof, wherein said plant is a crop plant or a monocot or a cereal, such as rice, maize, wheat, barley, millet, rye, triticale, sorghum and oats.
[0987] 135. Harvestable parts of a plant according to item 134, wherein said harvestable parts are preferably seeds.
[0988] 136. Products derived from a plant according to item 134 and/or from harvestable parts of a plant according to item 135.
[0989] 137. Use of a nucleic acid encoding an ASR polypeptide in increasing yield-related traits, particularly in increasing seed yield in plants, relative to control plants.
[0990] 138. An isolated nucleic acid molecule comprising any one of the following features:
   [0991] (i) a nucleic acid represented by any one of SEQ ID NO: 401, 403, 405, 407, 409, 411, 413, 415 and 417;
   [0992] (ii) the complement of a nucleic acid represented by any one of SEQ ID NO: 401, 403, 405, 407, 409, 411, 413, 415 and 417;
   [0993] (iii) a nucleic acid encoding an ASR polypeptide having, in increasing order of preference, at least 50%, 55%, 60%, 65%, 70%, 75%, 80%, 85%, 90%, 95%, 96%, 97%, 98%, 99% or more sequence identity to the amino acid sequence represented by any one of SEQ ID NO: 402, 404, 406, 408, 410, 412, 414, 416 and 418.
[0994] 139. An isolated polypeptide comprising:
   [0995] (i) an amino acid sequence represented by any one of SEQ ID NO: 402, 404, 406, 408, 410, 412, 414, 416 and 418;
   [0996] (ii) an amino acid sequence having, in increasing order of preference, at least 50%, 55%, 60%, 65%, 70%, 75%, 80%, 85%, 90%, 95%, 96%, 97%, 98%, 99% or more sequence identity to the amino acid sequence represented any one of SEQ ID NO: 402, 404, 406, 408, 410, 412, 414, 416 and 418.
   [0997] (iii) derivatives of any of the amino acid sequences given in (i) or (ii) above.
[0998] 140. A method for enhancing yield-related traits in plants relative to control plants, comprising modulating expression in a plant of a nucleic acid encoding a SPL11 polypeptide, wherein said SPL11 polypeptide comprises a SBP domain having in increasing order of preference at least 70%, 75%, 80%, 85%, 90%, 95%, 97% or more sequence identity to any one of SEQ ID NO: 456 to SEQ ID NO: 468 and SEQ ID NO: 478.
[0999] 141. Method according to item 140 wherein said SPL11 polypeptide in addition to the SBP domain comprises any one or more of the following conserved motifs:
   [1000] (i) Motif 1 as represented by SEQ ID NO: 469 wherein any conservative amino acid substitution and/or 1 or 2 non conservative substitution are allowed;
   [1001] (ii) Motif 2 as represented by SEQ ID NO: 470 wherein any change is allowed, provided that at least 4 amino acids have a polar side chain, preferably serine or threonine, and provided that the domain is located at the N-terminal end of the SBP domain;
   [1002] (iii) Motif 3 as represented by SEQ ID: 471 wherein 1 or 2 mismatches are allowed;
   [1003] (iv) Motif 4 as represented by SEQ ID: 472 wherein 1, 2 or 3 mismatches are allowed.
[1004] 142. Method according to item 140 or 141, wherein said modulated expression is effected by introducing and expressing in a plant a nucleic acid encoding a SPL11 polypeptide as defined in item 140 or 141.
[1005] 143. Method according to any of items 140 to 142, wherein said modulated expression is increased expression.
[1006] 144. Method according to any of items 140 to 143, wherein said nucleic acid encoding a SPL11 polypeptide encodes any one of the proteins listed in Table 01 or is a portion of such a nucleic acid, or a nucleic acid capable of hybridising with such a nucleic acid.
[1007] 145. Method according to any of items 140 to 144, wherein said nucleic acid sequence encodes an orthologue or paralogue of any of the proteins given in Table G1.
[1008] 146. Method according to item 145, wherein said nucleic acid encodes SEQ ID NO: 428.
[1009] 147. Method according to any of items 140 to 146, wherein said enhanced yield-related traits comprise increased yield, preferably increased total seed weight, number of filled seeds, number of seeds or florets per panicle, thousand-kernel weight, seed filling rate, and/or harvest index relative to control plants.
[1010] 148. Method according to any of items 140 to 147, wherein said enhanced yield-related traits comprise plant (seedling) early vigour relative to control plants.
[1011] 149. Method according to any one of items 140 to 147, wherein said enhanced yield-related traits are obtained under non-stress conditions.
[1012] 150. Method according to any one of items 140 to 147, wherein said enhanced yield-related traits are obtained under mild drought stress growth conditions.
[1013] 151. Method according to any one of items 140 to 147, wherein said enhanced yield-related traits are obtained under growth conditions of nitrogen deficiency.
[1014] 152. Method according to any one of items 140 to 151, wherein said nucleic acid is operably linked to a constitutive promoter, preferably to a GOS2 promoter, most preferably to a GOS2 promoter from rice.
[1015] 153. Method according to any one of items 140 to 151, wherein said nucleic acid is operably linked to a seed specific promoter, preferably to a WSI18 promoter, most preferably to a WSI18 promoter from rice.
[1016] 154 Method according to any of items 140 to 153, wherein said nucleic acid encoding a SPL11 polypeptide is of plant origin, preferably from a dicotyledonous plant, further preferably from the family Brassicaceae, more preferably from the genus Arabidopsis, most preferably from Arabidopsis thaliana.
[1017] 155. Plant or part thereof, including seeds, obtainable by a method according to any one of items 140 to 154, wherein said plant or part thereof comprises a recombinant nucleic acid encoding a SPL11 polypeptide.
[1018] 156. An isolated nucleic acid molecule comprising:
   [1019] (i) a nucleic acid represented by SEQ ID NO: 448;
   [1020] (ii) the complement of a nucleic acid represented by SEQ ID NO: 448;
   [1021] (iii) a nucleic acid encoding a SPL11 polypeptide having, in increasing order of preference, at least 70%, 75%, 80%, 85%, 90%, 95%, 96%, 97%, 98%, 99% or more sequence identity to the amino acid sequence represented by SEQ ID NO: 449, and having in increasing order of preference at least 70%, 75%, 80%, 85%, 90%, 95%, 96%, 97%, 98%, 99% or more sequence identity to SEQ ID NO: 465: SYCQVEGCRTDLSSAKDYHRKHRVCEPHSKAPKVVVAGLERRFCQQCSRFHG LAEFDQKKKSCRRRLNDHNARRRKPQPEAL;
   [1022] (iv) a nucleic acid hybridising under stringent conditions to SEQ ID NO: 448.
[1023] 157. An isolated polypeptide comprising:
   [1024] (i) an amino acid sequence represented by SEQ ID NO: 449;
   [1025] (ii) an amino acid sequence having, in increasing order of preference, at least 70%, 75%, 80%, 85%, 90%, 95%, 96%, 97%, 98%, 99% or more sequence identity to the amino acid sequence represented by SEQ ID NO: 449, and having in increasing order of preference at least 70%, 75%, 80%, 85%, 90%, 95%, 96%, 97%, 98%, 99% or more sequence identity to SEQ ID NO: 465:

SYCQVEGCRTDLSSAKDYHRKHRVCEPHSKAPKVVVAGLERRFCQQCSRF
HGLAEFDQKKKSCRRRLNDHNARRRKPQPEAL.

[1026] (iii) derivatives of any of the amino acid sequences given in (i) or (ii) above.
[1027] 158. Construct comprising:
   [1028] (i) nucleic acid encoding a SPL11 polypeptide;
   [1029] (ii) one or more control sequences capable of driving expression of the nucleic acid sequence of (i); and optionally
   [1030] (iii) a transcription termination sequence
[1031] 159. Construct according to item 158 wherein said nucleic acid encoding a SPL11 polypeptide is a nucleic acid according to item 156.
[1032] 160. Construct according to item 158 or 159 wherein one of said control sequences is a constitutive promoter, preferably a GOS2 promoter, most preferably a GOS2 promoter from rice.
[1033] 161. Construct according to item 158 or 159 wherein one of said control sequences is a seed specific promoter, preferably a WSI18 promoter, most preferably a WSI18 promoter from rice.
[1034] 162. Use of a construct according to items 158 to 161 in a method for making plants having increased yield related traits; particularly increased seed yield relative to control plants and/or plant or seedling early vigour.
[1035] 163. Plant, plant part or plant cell transformed with a construct according to items 158 to 161.
[1036] 164. Method for the production of a transgenic plant having increased yield related traits, particularly increased seed yield and/or plant or seedling early vigour relative to control plants, comprising:
   [1037] (i) introducing and expressing in a plant a nucleic acid encoding a SPL11 polypeptide; and
   [1038] (ii) cultivating the plant cell under conditions promoting plant growth and development.
[1039] 165. Transgenic plant having increased yield, particularly increased plant seedling vigour and/or increased seed yield, relative to control plants, resulting from increased expression of a nucleic acid encoding a SPL11 polypeptide, or a transgenic plant cell derived from said transgenic plant.
[1040] 166. Transgenic plant according to item 155, 163 or 165, or a transgenic plant cell derived thereof, wherein said plant is a dicot crop plant such as soybean, cotton or canola or a monocot crop plant or a cereal, such as rice, maize, wheat, barley, millet, rye, triticale, sorghum and oats.
[1041] 167. Harvestable parts of a plant according to item 166, wherein said harvestable parts are preferably shoot biomass, flowers and/or seeds.
[1042] 168. Products derived from a plant according to item 166 and/or from harvestable parts of a plant according to item 167.
[1043] 169. Use of a nucleic acid encoding a SPL11 polypeptide in increasing yield, particularly in increasing seed yield and/or shoot biomass in plants, relative to control plants.

### DESCRIPTION OF FIGURES

[1044] The present invention will now be described with reference to the following figures in which:

### I. LOB-Domain Comprising Protein (LOB: Lateral Organ Boundaries)

[1045] FIG. 1 represents the sequence of SEQ ID NO: 2, with the DUF260 domain shown in bold, the conserved motifs 1, 2 and 3 are underlined and the conserved Cys residues (motif of SEQ ID NO: 9) are shown in italics.

[1046] FIG. 2 represents a multiple alignment of sequences of various LBD proteins useful in the methods of the present invention.

[1047] FIG. 3 shows a phylogenetic tree of class II and class I LBD proteins. The sequence of SEQ ID NO: 2 is represented by AtLBD37.

[1048] FIG. 4 represents the binary vector for increased expression in Oryza sativa of a LBD-encoding nucleic acid under the control of a rice GOS2 promoter (pGOS2)

[1049] FIG. 5 details examples of LBD sequences useful in performing the methods according to the present invention.

### II. JMJC (JUMONJI-C) Polypeptide

[1050] FIG. 6 represents the amino acid sequence and domain structure of SEQ ID NO: 74. Conserved motifs and domains are indicated. JmjC domain is indicated in bold. Conserved motifs SEQ ID NO: 79, SEQ ID NO: 80 and SEQ ID NO: 81 are indicated by single, double and triple lined rectangles respectively. Underlined are the T (Theonine) and K (Lysine) amino acid residues that typically participate in 2-Oxogutarate coordination. Capital H indicates the Histidine amino acid residue coordinating the iron ion.

[1051] FIG. 7 represents a multiple alignment of JMJC proteins. The origin of the protein is indicated by the first two alphanumeric digits in the name, At: Arabidopsis thaliana, Pp: Populus trichocarpa, Os: Oryza sativa, Ot: streococcus tauri, Ce: Caenorhabditis elegans, Hs: Homo sapiens. Position of the conserved amino acid residues and domains corresponding to those described in FIG. 6 is indicated. A consensus sequence is given. Highly conserved amino acids in the consensus sequences are given; empty blank spaces represent any amino acid.

[1052] FIG. 8 shows a phylogenetic tree of JMJC polypeptides. The arrow shows SEQ ID NO: 74. Other JMJC polypeptides are named using the Genbank accession number. Group I (G I) comprises proteins of plant origin; Group II (GII) comprises proteins of non-plant origin.

[1053] FIG. 9 represents the binary vector for increased expression in Oryza sativa of SEQ ID NO: 73 under the control of a rice GOS2 promoter (pGOS2).

[1054] FIG. 10 details examples of JMJC sequences useful in performing the methods according to the present invention.

### III. Casein Kinase I

[1055] FIG. 11 represents the binary vector for increased expression in Oryza sativa of a GRP-encoding nucleic acid under the control of a rice WSI18 promoter (pWSI18::GRP)

[1056] FIG. 12 details examples of GRP sequences useful in performing the methods according to the present invention.

### IV. Plant Homeodomain Finger-Homeodomain (PHDf-HD) Polypeptide

[1057] FIG. 13 represents a neighbour-joining tree constructed after an alignment of all the transcription factors belonging to the HD family (downloaded from the riceTFDB database hosted at the server of the University of Potsdam) and all of the polypeptide sequences of Table D1 (when full length), performed using the Clustal algorithm (1.83) of progressive alignment, using default values. The group of interest, comprising the two rice paralogs (SEQ ID NO: 180 or Os02g05450.1, and SEQ ID NO: 202 or Os06g12400.1) has been circled. Any polypeptide falling within this HD group (after a new multiple alignment step as described hereinabove) is considered to be useful in performing the methods of the invention as described herein.

[1058] FIG. 14 represents a cartoon of a PHDf-HD polypeptide as represented by SEQ ID NO: 180, which comprises one or more of the following features: a predicted nuclear localisation signal (NLS), a leucine zipper (ZIP), a PHD finger (PHDf, PfamOD628), an acidic stretch, two basic stretches, a homeodomain (HD, Pfam00046).

[1059] FIG. 15 shows the sequence logo of the homeodomain (HID) of the PHDf-HD polypeptides of Table D1, where the overall height of the stack indicates the sequence conservation at that position, while the height of symbols within the stack indicates the relative frequency of each amino or nucleic acid at that position. The HD as represented by SEQ ID NO: 234, and comprised in SEQ ID NO: 180, is in accordance with the sequence logo as represented in this figure.

[1060] FIG. 16 shows the graphical output of the COILS algorithm predicting two coiled coil domains in the N-terminal half of the polypeptide as represented by SEQ ID NO: 180. The X axis represents the amino acid residue coordinates, the Y axis the probability (ranging from 0 to 1) that a coiled coil domain is present, and the three lines, the three windows (14, 21, 28) examined.

[1061] FIG. 17 shows a CLUSTAL W (1; 83) multiple sequence alignment of PHDf-HD polypeptides from Table D1 (when full length), where a number of features are identified. From the N-terminus to the C-terminus of the polypeptides are: (i) a predicted nuclear localisation signal (NLS); (ii) a leucine zipper (ZIP), with four heptads (boxed, in which usually a leucine (occasionally an isoleucine, a valine, or a methionine) appears every seventh amino acid); (iii) a PHD finger (PHDf), with the typical C4HC3 (four cysteines, one histidine, three cysteines) with a characteristic cysteine spacing; (iv) an acidic stretch (rich in acidic amino acids D and E); (v) basic stretches (rich in basic amino acids K and R); (vi) a homeodomain (HD).

[1062] FIG. 18 shows the binary vector for modulated, preferably increased, expression in Oryza sativa of a nucleic acid sequence encoding a PHDf-HD polypeptide under the control of a rice GOS2 promoter (pGOS2)

[1063] FIG. 19 details examples of a PHDf-HD sequences useful in performing the methods according to the present invention.

V. bHLH11-Like (Basic Helix-Loop-Helix 11) Protein

[1064] FIG. 20 represents the domain structure of SEQ ID NO: 245 with the conserved motifs indicated by underlining and their number. The HLH domain (motif 8) as determined by SMART is shown in bold underlined.

[1065] FIG. 21 represents a multiple alignment of various bHLH11-like proteins. A dot indicates conserved residues, a colon indicates highly conserved residues and an asterisk stands for perfectly conserved residues. The highest degree of sequence conservation is found in the region of the bHLH domain. The C-terminal part of AT2G24260 that extends beyond the other proteins in the alignment is deleted.

[1066] FIG. 22 Circular cladogram of selected bHLH proteins. bHLH11-like proteins and one Arabidopsis protein representing each of the other classes defined by Heim 2003 were used. The alignment was generated using “CLUSTALX”, and a neighbour-joining tree was calculated. The circular cladogram was drawn using Dendroscope (Huson et al. BMC Bioinformatics 2007). Bootstrap results for 100 replicates is indicated for some major nodes; the boxed bootstrap value shows that the group of bHLH11-like proteins is clearly delineated from the other bHLH proteins.

[1067] FIG. 23 represents the binary vector for increased expression in Oryza sativa of a bHLH11-like-encoding nucleic acid under the control of a rice GOS2 promoter (pGOS2).

[1068] FIG. 24 details examples of bHLH11-like sequences useful in performing the methods according to the present invention.

### VI. ASR (Abscisic Acid-, Stress-, and Ripening-Induced) Protein

[1069] FIG. 25 represents the binary vector for increased expression in Oryza sativa of a GRP-encoding nucleic acid under the control of a rice GOS2 promoter (pGOS2::GRP).

[1070] FIG. 26 details examples of GRP sequences useful in performing the methods according to the present invention.

### VII. Squamosa Promoter Binding Protein-Like 11 (SPL11)

[1071] FIG. 27 represents the amino acid sequence and domain structure of SEQ ID NO: 428. Conserved motifs and domains are indicated. SBP domain is underlined by an interrupted line; Motif 1 is indicated in bold; Motif 2 is indicated in bold and underlined; Motif 3 is bold capital letters and underlined and Motif 4 is in bold and underlined with a double line.

[1072] FIG. 28 represents a multiple sequence alignment of SPL11 polypeptides. Position of the conserved amino acid residues and domains corresponding to those described in FIG. 27 is indicated. A consensus sequence representative of SPL11 polypeptides is given. In the consensus sequence the highly conserved amino acids are provided and empty blank spaces in between represent any amino acid.

[1073] FIG. 29 shows a phylogenetic tree of SPL11 polypeptides. The phylogenetic tree is as present in Xie et al. Plant Physiology, 2006, Vol. 142, pp. 280-293, which is incorporated by reference herein as if fully set forth. SPL11 polypeptides cluster in the same group as AtSPL11 (identical to SEQ ID NO: 2) within the class named Class S3.

[1074] FIG. 30 provides a sequence analysis of rice miR156 genes (OsmiR156) and their targeted sequences in rice SPL polypeptides (FIG. 30 A) as well as a multiple alignment of SPL11 nucleic acids (FIG. 30 B). FIG. 30 A shows a sequence alignment of OsmiR156 mature sequences with complementary sequences of OsSPL genes. The conserved amino acid sequence encoded by the target sequences is shown at the bottom. The dots between miR156 and targeted OsSPL sequences indicate mismatches. FIG. 4B shows a multiple alignment of SPL11 nucleic acids where in highly conserved nucleic acid residues are indicated in the consensus sequence. The position of the highly conserved miR156 target site is indicated in bold over the consensus sequence. SEQ ID NO: 431, SEQ ID NO: 440 and SEQ ID NO: 454 representatives of SPL11 nucleic acids which are miR156 insensitive do not have the conserved miR156 target site or show a great divergence in their sequence at that position.

[1075] FIG. 31 represents the binary vector for increased expression in Oryza sativa of SEQ ID NO: 427 under the control of a rice GOS2 promoter (pGOS2) (FIG. 31A) or under a rice WSI 18 promoter (FIG. 318).

[1076] FIG. 32 details examples of SPL11 sequences useful in performing the methods according to the present invention.

### EXAMPLES

[1077] The present invention will now be described with reference to the following examples, which are by way of illustration alone. The following examples are not intended to completely define or otherwise limit the scope of the invention.

[1078] DNA manipulation: unless otherwise stated, recombinant DNA techniques are performed according to standard protocols described in Sambrook (2001) Molecular Cloning: a laboratory manual, 3rd Edition Cold Spring Harbor Laboratory Press, CSH, New York, or in Volumes 1 and 2 of Ausubel et al. (1994), Current Protocols in Molecular Biology, Current Protocols. Standard materials and methods for plant molecular work are described in Plant Molecular Biology Labfax (1993) by R. D. D. Croy, published by BIOS Scientific Publications Ltd (UK) and Blackwell Scientific Publications (UK).

### I. LOB-Domain Comprising Protein (LOB: Lateral Organ Boundaries)

### Example 1

### Identification of Sequences Related to the Nucleic Acid Sequence Used in the Methods of the Invention

[1079] Sequences (full length cDNA, ESTs or genomic) related to the nucleic acid sequence used in the methods of the present invention were identified amongst those maintained in the Entrez Nucleotides database at the National Center for Biotechnology Information (NCBI) using database sequence search tools, such as the Basic Local Alignment Tool (BLAST) (Altschul et al. (1990) J. Mol. Biol. 215:403-410; and Altschul et al. (1997) Nucleic Acids Res. 25:3389-3402). The program was used to find regions of local similarity between sequences by comparing nucleic acid or polypeptide sequences to sequence databases and by calculating the statistical significance of matches. For example, the polypeptide encoded by the nucleic acid used in the present invention was used for the TBLASTN algorithm, with default settings and the filter to ignore low complexity sequences set off. The output of the analysis was viewed by pairwise comparison, and ranked according to the probability score (E-value), where the score reflect the probability that a particular alignment occurs by chance (the lower the E-value, the more significant the hit). In addition to E-values, comparisons were also scored by percentage identity. Percentage identity refers to the number of identical nucleotides (or amino acids) between the two compared nucleic acid (or polypeptide) sequences over a particular length.

[1080] Table A1 provides a list of nucleic acid sequences related to the LBD nucleic acid sequence used in the methods of the present invention.

TABLE A1
Examples of LBD polypeptides: add DNA sequences of rice,
corn, wheat, canola, potato, soy, Arabidopsis

| | Nucleic acid | Protein |
|---|---|---|
| Plant Source* | SEQ ID NO: | SEQ ID NO: |
| Arabidopsis thaliana LBD protein | 1 | 2 |
| Os01g03890, Oryza sativa | 59 | 11 |
| Os01g32770, Oryza sativa | 60 | 12 |
| Os03g33090, Oryza sativa | 61 | 13 |
| Os03g41330, Oryza sativa | 62 | 14 |
| Os07g40000, Oryza sativa | 63 | 15 |
| TC9404, Nicotiana benthamiana | | 16 |
| TC227562, Glycine max | | 17 |
| TC216138, Glycine max | | 18 |
| TC147776, Hordeum vulgare | | 19 |
| TC104758, Sorghum bicolor | | 20 |
| TC18561, Aquilegia sp. | | 21 |
| TC60668, Vitis vinifera | | 22 |
| TC15459, Lotus japonicus | | 23 |
| TC30552, Gossypium hirsutum | | 24 |
| TC235711, Triticum aestivum | 71 | 25 |
| TC133081, Solanum tuberosum | | 26 |
| TC107091, Medicago truncatula | | 27 |
| TC147808, Hordeum vulgare | | 28 |
| TC55931, Vitis vinifera | | 29 |
| TC162239, Solanum tuberosum | | 30 |
| TC69225, Pinus taeda | | 31 |
| TC67269, Pinus taeda | | 32 |
| TC220806, Glycine max | | 33 |
| TC270332, Triticum aestivum | | 34 |
| TC18329, Aquilegia sp. | | 35 |
| TC137193, Solanum tuberosum | | 36 |
| TC133385, Solanum tuberosum | | 37 |
| TC140088, Solanum tuberosum | | 38 |
| TC14656, Picea alba | | 39 |
| TC59178, Pinus taeda | | 40 |
| TC67974, Pinus taeda | | 41 |
| TC178827, Lycopersicon esculentum | | 42 |
| Pt-III.589, Populus tremuloides | | 43 |
| Pt-V.543, Populus tremuloides | | 44 |
| Pt-XIV.94, Populus tremuloides | | 45 |
| Pt-II105, Populus tremuloides | | 46 |
| Pt-123.86, Populus tremuloides | | 47 |
| Pt-X180, Populus tremuloides | | 48 |
| Pt-XII.481, Populus tremuloides | | 49 |
| DQ787782, Caragana korshinskii | | 50 |
| AAP37970, Brassica napus | | 51 |
| ABE82505, Medicago truncatula | 72 | 52 |
| ABE78739, Medicago truncatula | | 53 |
| Q9SN23, Arabidopsis thaliana | 64 | 54 |
| Q9SZE8, Arabidopsis thaliana | 65 | 55 |
| Q9ZW96, Arabidopsis thaliana | 66 | 56 |
| Q9M886, Arabidopsis thaliana | 67 | 57 |
| Q9CA30, Arabidopsis thaliana | 68 | 58 |
| Ls_LBD, Linum usitatissimum | 69 | 70 |

*GenBank or SwissProt database accession numbers are provided where available, TC codes are from TIGR.

### Example 2

### Alignment of LBD Polypeptide Sequences

[1081] Alignment of polypeptide sequences was performed using the AlignX programme from the Vector NTI (Invitrogen) which is based on the popular Clustal W algorithm of progressive alignment (Thompson et al. (1997) Nucleic Acids Res 25:4876-4882; Chema et al. (2003). Nucleic Acids Res 31:3497-3500). Default values were for the gap open penalty of 10, for the gap extension penalty of 0,1 and the selected weight matrix is Blosum 62. Minor manual editing was done to further optimise the alignment. Sequence conservation among LBD polypeptides was essentially in the N-terminal DUF260 domain of the polypeptides, the C-terminal region usually being more variable in sequence length and composition. The LBD polypeptides are aligned in FIG. 2.

[1082] A phylogenetic tree of LBD polypeptides (FIG. 3) was constructed using a neighbour-joining clustering algorithm as provided in the AlignX programme from the Vector NTI (Invitrogen). The sequences of class I LBD proteins used in the construction of the tree are publicly available and are indicated with their GenBank or SwissProt accession numbers.

### Example 3

### Calculation of Global Percentage Identity Between Polypeptide Sequences Useful in Performing the Methods of the Invention

[1083] Global percentages of similarity and identity between full length polypeptide sequences useful in performing the methods of the invention were determined using one of the methods available in the art, the MatGAT (Matrix Global Alignment Tool) software (BMC Bioinformatics. 2003 4:29. MatGAT: an application that generates similarity/identity matrices using protein or DNA sequences. Campanella J J, Bitincka L, Smalley J; software hosted by Ledion Bitincka). MatGAT software generates similarity/identity matrices for DNA or protein sequences without needing pre-alignment of the data. The program performs a series of pair-wise alignments using the Myers and Miller global alignment algorithm (with a gap opening penalty of 12, and a gap extension penalty of 2), calculates similarity and identity using for example Blosum 62 (for polypeptides), and then places the results in a distance matrix. Sequence similarity is shown in the bottom half of the dividing line and sequence identity is shown in the top half of the diagonal dividing line.

[1084] Parameters used in the comparison were:
[1085] Scoring matrix: Blosum62
[1086] First Gap: 12
[1087] Extending gap: 2

[1088] Results of the software analysis are shown in Table B for the global similarity and identity over the full length of the polypeptide sequences. Percentage identity is given above the diagonal in bold and percentage similarity is given below the diagonal (normal face).

[1089] The percentage identity between the LBD polypeptide sequences useful in performing the methods of the invention can be as low as 30.2% amino acid identity compared to SEQ ID NO: 2 (represented by At-LBD37, row 44). The % identity will likely be higher when only the sequences of the DUF206 domain are compared. To identify the DUF260 domain (as delineated in FIG. 1) in other LBD proteins, the multiple alignment of FIG. 2 may be used.

TABLE A2
MatGAT results for global similarity and identity over the full length of the LBD
polypeptide sequences.

| | 1 | 2 | 3 | 4 | 5 | 6 | 7 | 8 | 9 | 10 | 11 | 12 |
|---|---|---|---|---|---|---|---|---|---|---|---|---|
| 1. Os-Os01g03890 | | 43.2 | 35.8 | 34.5 | 34.4 | 32.9 | 33.0 | 35.5 | 35.2 | 34.5 | 31.5 | 32.2 |
| 2. Os-Os01g32770 | 55.5 | | 31.0 | 31.1 | 31.5 | 30.3 | 32.4 | 30.7 | 30.6 | 30.9 | 29.8 | 31.2 |
| 3. Os-Os03g33090 | 46.9 | 40.3 | | 48.3 | 65.0 | 56.7 | 53.9 | 52.1 | 66.7 | 71.3 | 51.5 | 55.0 |
| 4. Os-Os03g41330 | 46.3 | 43.0 | 60.3 | | 48.3 | 43.0 | 43.2 | 41.2 | 46.4 | 48.6 | 40.2 | 45.1 |
| 5. Os-Os07g40000 | 45.9 | 40.9 | 73.0 | 59.9 | | 53.0 | 50.6 | 49.6 | 68.0 | 63.1 | 47.6 | 52.3 |
| 6. Nb-TC9404 | 45.9 | 42.4 | 66.5 | 60.3 | 67.7 | | 60.7 | 60.3 | 51.7 | 51.5 | 56.7 | 66.5 |
| 7. Gm-TC227562 | 45.0 | 44.5 | 65.2 | 59.1 | 65.2 | 75.2 | | 73.7 | 50.6 | 49.4 | 55.2 | 64.8 |
| 8. Gm-TC216138 | 47.2 | 41.5 | 63.3 | 58.8 | 62.1 | 70.4 | 79.6 | | 50.0 | 48.8 | 53.3 | 65.3 |
| 9. Hv-TC147776 | 45.9 | 41.5 | 76.1 | 58.6 | 79.6 | 69.2 | 67.4 | 63.8 | | 58.7 | 47.3 | 52.2 |
| 10. Sb-TC104758 | 45.3 | 40.6 | 77.0 | 59.6 | 71.1 | 63.0 | 62.6 | 58.8 | 68.5 | | 49.0 | 51.7 |
| 11. Aq-TC18561 | 47.2 | 43.3 | 61.5 | 56.9 | 62.3 | 67.5 | 69.7 | 63.8 | 67.1 | 61.7 | | 58.1 |
| 12. Vv-TC60668 | 45.0 | 43.3 | 65.4 | 59.1 | 66.7 | 79.4 | 77.4 | 77.1 | 66.2 | 64.7 | 72.7 | |
| 13. Lj-TC15459 | 45.6 | 40.9 | 64.1 | 59.1 | 64.1 | 72.2 | 81.4 | 88.8 | 67.5 | 61.6 | 70.5 | 79.3 |
| 14. Gh-TC30552 | 46.3 | 43.0 | 66.8 | 63.4 | 64.7 | 75.9 | 78.4 | 75.4 | 66.8 | 64.3 | 72.8 | 82.8 |
| 15. Ta-TC235711 | 56.7 | 61.5 | 42.9 | 43.2 | 46.3 | 46.7 | 46.3 | 47.4 | 47.0 | 44.6 | 48.4 | 45.6 |
| 16. St-TC133081 | 59.0 | 55.8 | 47.4 | 48.5 | 47.1 | 50.7 | 49.6 | 47.4 | 49.3 | 48.9 | 50.4 | 50.0 |
| 17. Mt-TC107091 | 58.6 | 60.0 | 45.5 | 46.2 | 43.5 | 46.5 | 46.2 | 47.2 | 42.5 | 44.9 | 49.2 | 49.2 |
| 18. Hv-TC147808 | 59.0 | 64.8 | 42.1 | 42.1 | 44.7 | 44.4 | 46.7 | 46.0 | 45.0 | 44.7 | 44.4 | 45.0 |
| 19. Vv-TC55931 | 57.0 | 55.2 | 49.4 | 47.8 | 46.2 | 53.0 | 51.4 | 49.8 | 48.2 | 46.2 | 53.8 | 51.8 |
| 20. St-TC162239 | 49.5 | 48.2 | 50.4 | 52.6 | 51.7 | 54.7 | 54.7 | 55.0 | 46.6 | 51.1 | 57.7 | 56.8 |
| 21. Pta-TC69225 | 53.0 | 50.0 | 38.9 | 41.6 | 40.4 | 44.9 | 44.9 | 43.1 | 43.1 | 41.9 | 44.9 | 44.6 |
| 22. Pta-TC67269 | 51.8 | 52.7 | 39.6 | 41.4 | 39.3 | 42.6 | 42.9 | 41.4 | 43.2 | 40.8 | 44.0 | 42.6 |
| 23. Gm-TC220806 | 45.9 | 46.1 | 56.4 | 49.1 | 51.3 | 54.5 | 52.6 | 51.7 | 52.3 | 48.5 | 52.4 | 53.5 |
| 24. Ta-TC270332 | 41.4 | 40.6 | 56.5 | 84.5 | 59.1 | 61.3 | 59.1 | 57.1 | 60.0 | 57.9 | 59.7 | 58.7 |
| 25. Aq-TC18329 | 62.5 | 61.5 | 46.6 | 47.9 | 44.1 | 50.0 | 50.7 | 47.6 | 44.8 | 45.2 | 51.4 | 49.7 |
| 26. St-TC137193 | 45.6 | 42.1 | 68.7 | 57.3 | 65.9 | 89.3 | 72.6 | 70.4 | 68.9 | 61.3 | 74.0 | 77.6 |
| 27. St-TC133385 | 45.6 | 41.8 | 70.8 | 56.9 | 66.4 | 87.9 | 71.3 | 68.3 | 66.2 | 62.1 | 70.6 | 76.3 |
| 28. St-TC140088 | 44.3 | 42.1 | 64.5 | 51.3 | 61.5 | 71.0 | 68.3 | 65.8 | 65.8 | 60.9 | 68.4 | 70.2 |
| 29. Pa-TC14656 | 48.5 | 45.2 | 47.7 | 46.9 | 48.4 | 51.6 | 52.7 | 52.7 | 47.3 | 48.0 | 53.4 | 53.8 |
| 30. Pta-TC59178 | 47.7 | 45.2 | 40.5 | 40.2 | 43.5 | 44.1 | 43.3 | 44.6 | 44.1 | 40.5 | 46.8 | 46.6 |
| 31. Pta-TC67974 | 48.2 | 45.2 | 50.0 | 48.2 | 46.4 | 52.5 | 52.2 | 54.3 | 48.6 | 49.3 | 54.0 | 54.3 |
| 32. Le-TC178827 | 45.9 | 41.8 | 68.3 | 57.8 | 66.8 | 89.7 | 73.9 | 71.7 | 67.6 | 62.1 | 73.6 | 78.1 |
| 33. Pt-III.589 | 45.0 | 43.9 | 63.0 | 60.1 | 62.6 | 73.5 | 76.5 | 79.6 | 68.5 | 64.3 | 69.7 | 79.0 |
| 34. Pt-V.543 | 48.2 | 43.9 | 64.5 | 60.3 | 60.7 | 74.0 | 76.4 | 77.7 | 66.5 | 63.6 | 68.6 | 77.3 |
| 35. Pt-XIV.94 | 41.7 | 39.4 | 64.4 | 56.0 | 58.0 | 63.4 | 61.3 | 58.8 | 61.3 | 55.7 | 64.9 | 64.5 |
| 36. Pt-II105 | 43.0 | 39.1 | 63.9 | 54.7 | 58.0 | 60.7 | 63.0 | 58.8 | 65.3 | 56.6 | 63.6 | 65.8 |
| 37. Pt-123.86 | 57.7 | 57.9 | 47.6 | 46.3 | 46.3 | 46.6 | 48.6 | 47.6 | 43.6 | 45.9 | 47.3 | 45.9 |
| 38. Pt-X180 | 52.1 | 49.4 | 50.2 | 51.0 | 49.8 | 54.8 | 55.6 | 55.2 | 48.5 | 50.2 | 56.0 | 57.7 |
| 39. Pt-XII.481 | 51.5 | 47.3 | 43.6 | 45.8 | 44.7 | 48.4 | 46.5 | 49.5 | 46.5 | 46.9 | 46.9 | 50.9 |
| 40. Ck-LOB-DQ787782 | 48.5 | 43.3 | 66.7 | 59.5 | 60.6 | 73.2 | 82.3 | 82.1 | 65.8 | 61.7 | 71.4 | 77.5 |
| 41. Bn-AAP37970 | 56.0 | 56.1 | 48.9 | 49.6 | 46.2 | 49.6 | 50.4 | 51.9 | 50.0 | 47.0 | 50.0 | 51.5 |
| 42. Mt-ABE82505 | 47.2 | 44.2 | 65.2 | 62.2 | 65.2 | 72.5 | 79.8 | 80.8 | 64.8 | 64.3 | 71.7 | 76.8 |
| 43. Mt-ABE78739 | 54.7 | 56.7 | 45.7 | 48.9 | 44.6 | 50.7 | 50.4 | 49.6 | 47.1 | 47.8 | 51.1 | 50.4 |
| 44. At-LBD37-Q9FN11 | 45.0 | 46.1 | 61.6 | 56.4 | 64.0 | 68.8 | 68.8 | 69.6 | 64.0 | 63.6 | 64.0 | 68.8 |
| 45. At-LBD38-Q9SN23 | 45.9 | 45.2 | 61.9 | 55.5 | 63.2 | 61.9 | 70.4 | 70.4 | 62.8 | 63.6 | 67.6 | 70.9 |
| 46. At-LBD39-Q9SZE8 | 45.0 | 41.8 | 61.3 | 56.7 | 63.3 | 65.8 | 70.8 | 67.9 | 60.0 | 62.5 | 70.4 | 71.7 |
| 47. At-LBD40-Q9ZW96 | 53.1 | 49.1 | 54.5 | 54.1 | 55.8 | 55.8 | 54.9 | 52.5 | 53.2 | 56.2 | 60.9 | 56.7 |
| 48. At-LBD41-Q9M886 | 52.8 | 56.7 | 44.9 | 49.0 | 47.5 | 49.8 | 50.6 | 47.9 | 49.8 | 47.1 | 51.0 | 50.2 |
| 49. At-LBD42-Q9CA30 | 52.4 | 49.4 | 54.1 | 50.2 | 51.9 | 58.4 | 57.5 | 52.9 | 54.1 | 52.8 | 55.4 | 55.4 |
| | 13 | 14 | 15 | 16 | 17 | 18 | 19 | 20 | 21 | 22 | 23 | 24 |
| 1. Os-Os01g03890 | 33.7 | 33.0 | 42.5 | 46.6 | 42.9 | 43.5 | 42.8 | 37.7 | 36.0 | 36.8 | 38.1 | 32.2 |
| 2. Os-Os01g32770 | 30.1 | 32.4 | 52.2 | 46.5 | 47.1 | 54.4 | 41.7 | 37.0 | 37.1 | 38.2 | 39.7 | 30.9 |
| 3. Os-Os03g33090 | 54.0 | 54.5 | 32.4 | 37.0 | 34.4 | 31.3 | 37.2 | 37.6 | 30.2 | 28.3 | 41.3 | 47.4 |
| 4. Os-Os03g41330 | 41.2 | 44.1 | 32.1 | 33.1 | 30.2 | 31.4 | 36.4 | 37.0 | 29.9 | 28.4 | 35.5 | 78.7 |
| 5. Os-Os07g40000 | 50.0 | 51.7 | 34.7 | 35.8 | 33.9 | 33.2 | 35.2 | 36.5 | 28.7 | 28.3 | 38.7 | 46.3 |
| 6. Nb-TC9404 | 60.8 | 63.7 | 33.7 | 35.8 | 33.2 | 32.1 | 38.7 | 38.1 | 32.3 | 29.8 | 39.6 | 44.0 |
| 7. Gm-TC227562 | 72.4 | 67.6 | 33.1 | 34.7 | 33.2 | 33.1 | 36.6 | 36.2 | 32.3 | 30.7 | 39.3 | 42.8 |
| 8. Gm-TC216138 | 81.5 | 66.5 | 34.4 | 34.2 | 33.2 | 33.2 | 37.0 | 35.7 | 31.1 | 30.7 | 37.6 | 42.3 |
| 9. Hv-TC147776 | 50.8 | 51.9 | 34.9 | 35.4 | 31.6 | 32.6 | 36.8 | 34.6 | 29.3 | 28.6 | 37.9 | 45.4 |
| 10. Sb-TC104758 | 49.4 | 51.3 | 33.8 | 34.5 | 32.5 | 33.1 | 35.3 | 38.0 | 29.6 | 30.1 | 37.4 | 46.9 |
| 11. Aq-TC18561 | 54.8 | 58.5 | 33.4 | 35.0 | 34.2 | 32.1 | 37.5 | 37.6 | 32.3 | 30.8 | 37.3 | 41.1 |
| 12. Vv-TC60668 | 65.6 | 68.3 | 33.1 | 35.6 | 35.9 | 32.1 | 36.2 | 38.5 | 33.3 | 32.0 | 39.6 | 43.5 |
| 13. Lj-TC15459 | | 64.9 | 34.5 | 33.2 | 33.8 | 33.4 | 36.0 | 36.5 | 34.1 | 29.4 | 36.8 | 39.6 |
| 14. Gh-TC30552 | 76.8 | | 36.2 | 35.4 | 33.9 | 34.1 | 37.5 | 36.9 | 32.0 | 30.7 | 40.1 | 44.2 |
| 15. Ta-TC235711 | 47.4 | 49.5 | | 45.5 | 49.5 | 89.9 | 49.1 | 41.3 | 37.8 | 36.4 | 46.0 | 31.8 |
| 16. St-TC133081 | 50.0 | 50.4 | 57.5 | | 56.6 | 47.4 | 52.5 | 45.4 | 37.4 | 40.1 | 50.0 | 32.5 |
| 17. Mt-TC107091 | 48.2 | 47.5 | 61.5 | 66.4 | | 50.5 | 48.8 | 41.6 | 36.4 | 39.5 | 51.7 | 31.2 |
| 18. Hv-TC147808 | 45.4 | 47.7 | 92.4 | 59.6 | 63.2 | | 48.3 | 39.0 | 37.8 | 39.1 | 43.7 | 31.8 |
| 19. Vv-TC55931 | 51.8 | 51.4 | 60.3 | 63.1 | 61.1 | 57.9 | | 47.0 | 35.8 | 38.1 | 51.2 | 36.4 |
| 20. St-TC162239 | 54.9 | 55.1 | 55.7 | 58.8 | 52.8 | 52.3 | 63.2 | | 32.9 | 36.0 | 48.7 | 37.7 |
| 21. Pta-TC69225 | 46.4 | 44.0 | 50.9 | 51.5 | 53.0 | 51.2 | 47.9 | 43.1 | | 44.5 | 32.9 | 27.8 |
| 22. Pta-TC67269 | 42.3 | 44.3 | 50.9 | 54.8 | 52.4 | 52.4 | 50.0 | 46.4 | 63.1 | | 35.3 | 28.6 |
| 23. Gm-TC220806 | 51.1 | 54.7 | 51.6 | 55.8 | 55.5 | 49.0 | 57.3 | 60.7 | 40.1 | 42.0 | | 35.8 |
| 24. Ta-TC270332 | 54.9 | 61.2 | 44.3 | 45.3 | 44.2 | 42.7 | 47.8 | 50.9 | 41.0 | 40.2 | 51.7 | |
| 25. Aq-TC18329 | 49.7 | 51.0 | 63.8 | 70.0 | 70.8 | 65.2 | 65.9 | 55.5 | 52.1 | 53.6 | 54.1 | 45.9 |
| 26. St-TC137193 | 71.3 | 74.6 | 46.0 | 48.9 | 48.5 | 45.4 | 52.6 | 52.1 | 43.1 | 41.7 | 57.1 | 58.7 |
| 27. St-TC133385 | 70.0 | 73.3 | 43.9 | 48.9 | 46.5 | 43.0 | 52.6 | 53.0 | 41.9 | 41.4 | 57.1 | 57.0 |
| 28. St-TC140088 | 66.7 | 70.3 | 45.3 | 47.4 | 46.8 | 43.0 | 53.0 | 52.6 | 42.5 | 41.1 | 55.3 | 52.2 |
| 29. Pa-TC14656 | 51.6 | 53.4 | 50.2 | 49.8 | 48.2 | 50.0 | 46.6 | 52.3 | 47.3 | 46.1 | 44.8 | 44.8 |
| 30. Pta-TC59178 | 44.4 | 45.7 | 41.6 | 44.9 | 46.6 | 44.9 | 44.4 | 42.7 | 47.4 | 49.6 | 39.1 | 40.2 |
| 31. Pta-TC67974 | 50.7 | 54.3 | 49.1 | 50.0 | 48.2 | 47.0 | 47.8 | 51.8 | 46.4 | 48.2 | 46.7 | 47.8 |
| 32. Le-TC178827 | 72.6 | 75.4 | 46.7 | 48.9 | 48.2 | 43.7 | 53.0 | 52.1 | 42.5 | 43.2 | 56.9 | 58.3 |
| 33. Pt-III.589 | 78.6 | 81.9 | 50.5 | 51.5 | 48.5 | 47.0 | 55.3 | 57.1 | 44.3 | 44.6 | 53.4 | 58.0 |
| 34. Pt-V.543 | 76.9 | 79.8 | 49.1 | 52.2 | 49.2 | 48.0 | 53.0 | 56.2 | 45.2 | 45.5 | 53.3 | 57.0 |
| 35. Pt-XIV.94 | 59.9 | 62.5 | 44.9 | 45.6 | 42.5 | 44.0 | 48.2 | 51.7 | 41.6 | 41.4 | 56.3 | 57.8 |
| 36. Pt-II105 | 61.6 | 62.5 | 43.9 | 47.4 | 43.5 | 42.1 | 47.4 | 55.1 | 38.9 | 40.8 | 56.7 | 55.2 |
| 37. Pt-123.86 | 47.6 | 48.3 | 56.1 | 67.2 | 75.4 | 55.3 | 61.8 | 54.7 | 53.3 | 51.5 | 55.1 | 43.9 |
| 38. Pt-X180 | 56.0 | 56.8 | 53.0 | 56.6 | 55.1 | 51.0 | 66.4 | 59.8 | 48.8 | 47.6 | 60.2 | 49.8 |
| 39. Pt-XII.481 | 48.4 | 50.2 | 52.3 | 58.0 | 53.8 | 49.7 | 58.2 | 54.6 | 45.5 | 49.1 | 51.3 | 44.0 |
| 40. Ck-LOB-DQ787782 | 80.2 | 79.3 | 49.1 | 51.8 | 46.5 | 47.0 | 53.0 | 54.3 | 43.7 | 44.9 | 53.2 | 58.0 |
| 41. Bn-AAP37970 | 47.0 | 51.1 | 58.9 | 65.7 | 67.4 | 56.0 | 60.2 | 57.6 | 47.6 | 48.5 | 56.8 | 47.3 |
| 42. Mt-ABE82505 | 78.9 | 77.7 | 50.2 | 50.7 | 47.8 | 48.7 | 54.2 | 54.3 | 44.9 | 45.8 | 52.8 | 61.8 |
| 43. Mt-ABE78739 | 53.6 | 50.4 | 59.2 | 66.9 | 71.8 | 60.3 | 64.4 | 54.0 | 52.4 | 49.7 | 56.5 | 46.4 |
| 44. At-LBD37-Q9FN11 | 67.6 | 75.2 | 48.8 | 54.0 | 49.5 | 47.0 | 54.9 | 55.6 | 45.2 | 44.6 | 52.0 | 56.4 |
| 45. At-LBD38-Q9SN23 | 63.6 | 73.7 | 48.4 | 51.1 | 48.8 | 47.0 | 51.8 | 55.1 | 46.4 | 46.1 | 52.2 | 53.0 |
| 46. At-LBD39-Q9SZE8 | 73.8 | 70.0 | 48.8 | 50.4 | 47.8 | 47.4 | 52.6 | 53.8 | 45.2 | 43.8 | 51.7 | 61.7 |
| 47. At-LBD40-Q9ZW96 | 53.2 | 56.2 | 54.4 | 61.7 | 62.1 | 51.3 | 60.9 | 61.5 | 48.5 | 48.2 | 62.2 | 52.8 |
| 48. At-LBD41-Q9M886 | 49.8 | 52.1 | 56.8 | 67.5 | 67.4 | 57.0 | 61.2 | 58.9 | 49.1 | 49.1 | 57.4 | 46.0 |
| 49. At-LBD42-Q9CA30 | 56.1 | 54.5 | 54.0 | 54.7 | 54.5 | 51.3 | 60.5 | 64.5 | 47.0 | 45.8 | 62.7 | 51.1 |
| | 25 | 26 | 27 | 28 | 29 | 30 | 31 | 32 | 33 | 34 | 35 | 36 |
| 1. Os-Os01g03890 | 44.0 | 32.9 | 33.6 | 32.2 | 32.4 | 32.5 | 32.1 | 33.5 | 33.7 | 33.7 | 33.2 | 33.2 |
| 2. Os-Os01g32770 | 46.3 | 30.0 | 29.4 | 29.7 | 28.1 | 29.4 | 30.4 | 30.9 | 30.6 | 29.1 | 30.0 | 31.5 |
| 3. Os-Os03g33090 | 33.3 | 61.0 | 60.2 | 50.0 | 35.7 | 33.9 | 38.7 | 60.0 | 52.9 | 52.9 | 50.2 | 51.7 |
| 4. Os-Os03g41330 | 31.7 | 44.0 | 44.0 | 39.0 | 36.7 | 30.2 | 36.1 | 44.7 | 41.0 | 41.0 | 41.0 | 39.7 |
| 5. Os-Os07g40000 | 34.1 | 52.6 | 52.5 | 46.8 | 35.3 | 33.3 | 37.5 | 51.9 | 49.6 | 48.6 | 46.5 | 46.0 |
| 6. Nb-TC9404 | 36.6 | 83.2 | 82.3 | 57.5 | 38.9 | 36.9 | 41.9 | 83.2 | 64.2 | 64.9 | 50.2 | 49.1 |
| 7. Gm-TC227562 | 35.2 | 61.1 | 60.3 | 51.0 | 39.8 | 36.6 | 41.1 | 62.1 | 65.3 | 64.5 | 48.5 | 48.5 |
| 8. Gm-TC216138 | 34.1 | 61.4 | 60.2 | 51.7 | 38.2 | 34.9 | 40.2 | 61.7 | 67.2 | 66.8 | 47.5 | 46.9 |
| 9. Hv-TC147776 | 32.8 | 54.2 | 54.6 | 50.2 | 33.8 | 32.7 | 35.7 | 53.6 | 50.0 | 49.8 | 46.2 | 47.3 |
| 10. Sb-TC104758 | 31.4 | 51.7 | 51.5 | 46.7 | 35.6 | 33.1 | 37.5 | 49.0 | 52.5 | 50.2 | 43.8 | 45.1 |
| 11. Aq-TC18561 | 35.5 | 59.3 | 58.8 | 52.8 | 38.3 | 36.4 | 40.5 | 58.0 | 56.8 | 59.4 | 52.6 | 48.5 |
| 12. Vv-TC60668 | 35.1 | 67.1 | 67.2 | 54.5 | 39.6 | 36.6 | 42.3 | 66.5 | 69.4 | 66.7 | 50.9 | 50.4 |
| 13. Lj-TC15459 | 33.4 | 59.7 | 59.2 | 51.0 | 37.4 | 37.6 | 39.2 | 60.7 | 65.6 | 64.9 | 47.9 | 47.9 |
| 14. Gh-TC30552 | 35.2 | 63.9 | 63.4 | 57.3 | 39.4 | 37.2 | 41.6 | 64.2 | 71.4 | 70.9 | 50.0 | 50.0 |
| 15. Ta-TC235711 | 50.3 | 33.8 | 32.8 | 32.4 | 29.5 | 31.0 | 30.8 | 34.5 | 36.2 | 34.8 | 33.4 | 34.5 |
| 16. St-TC133081 | 57.4 | 33.2 | 34.7 | 32.5 | 30.9 | 32.1 | 32.6 | 35.4 | 36.4 | 36.0 | 35.0 | 34.2 |
| 17. Mt-TC107091 | 56.8 | 34.2 | 33.6 | 33.1 | 31.5 | 32.0 | 31.0 | 33.9 | 33.8 | 35.2 | 29.6 | 30.8 |
| 18. Hv-TC147808 | 50.6 | 34.4 | 31.5 | 29.1 | 31.4 | 31.6 | 30.3 | 33.1 | 34.8 | 34.8 | 32.1 | 32.5 |
| 19. Vv-TC55931 | 56.3 | 37.5 | 39.2 | 36.6 | 33.8 | 31.2 | 34.9 | 38.4 | 37.3 | 35.5 | 36.8 | 35.9 |
| 20. St-TC162239 | 41.8 | 36.3 | 37.2 | 35.0 | 35.6 | 32.0 | 35.7 | 37.6 | 39.0 | 37.3 | 37.6 | 37.9 |
| 21. Pta-TC69225 | 36.9 | 30.5 | 31.6 | 29.6 | 30.5 | 30.7 | 31.2 | 29.9 | 31.7 | 31.8 | 31.1 | 30.2 |
| 22. Pta-TC67269 | 43.1 | 30.1 | 29.2 | 29.2 | 28.5 | 30.0 | 32.2 | 31.5 | 29.5 | 31.0 | 29.8 | 29.8 |
| 23. Gm-TC220806 | 50.0 | 43.4 | 42.1 | 38.4 | 34.7 | 28.1 | 35.5 | 42.8 | 39.6 | 38.5 | 40.5 | 41.9 |
| 24. Ta-TC270332 | 32.1 | 45.5 | 43.5 | 39.2 | 35.7 | 30.3 | 36.8 | 43.3 | 41.3 | 40.9 | 40.9 | 39.7 |
| 25. Aq-TC18329 | | 35.5 | 35.2 | 31.4 | 30.2 | 33.1 | 31.5 | 34.8 | 33.4 | 35.5 | 33.4 | 34.1 |
| 26. St-TC137193 | 48.6 | | 96.8 | 58.4 | 38.8 | 36.1 | 41.9 | 95.0 | 64.3 | 62.5 | 50.2 | 50.2 |
| 27. St-TC133385 | 48.6 | 96.8 | | 59.7 | 38.1 | 35.8 | 40.1 | 92.8 | 63.9 | 60.9 | 50.7 | 50.9 |
| 28. St-TC140088 | 47.9 | 72.4 | 71.9 | | 38.8 | 33.2 | 39.8 | 58.7 | 54.1 | 53.8 | 46.3 | 45.6 |
| 29. Pa-TC14656 | 49.7 | 51.6 | 51.6 | 54.2 | | 38.6 | 88.1 | 38.7 | 42.1 | 40.3 | 33.5 | 33.5 |
| 30. Pta-TC59178 | 46.0 | 44.9 | 44.6 | 43.3 | 54.3 | | 39.4 | 36.9 | 36.4 | 38.4 | 32.5 | 31.4 |
| 31. Pta-TC67974 | 49.3 | 52.2 | 51.4 | 52.9 | 92.8 | 53.2 | | 41.7 | 42.5 | 42.8 | 35.0 | 36.1 |
| 32. Le-TC178827 | 48.3 | 97.2 | 95.0 | 71.6 | 50.9 | 45.2 | 51.4 | | 64.6 | 62.2 | 49.5 | 49.5 |
| 33. Pt-III.589 | 49.7 | 73.5 | 72.3 | 65.5 | 54.2 | 44.9 | 56.5 | 75.2 | | 83.3 | 50.4 | 48.7 |
| 34. Pt-V.543 | 50.3 | 73.6 | 71.5 | 64.0 | 54.2 | 46.8 | 56.2 | 73.1 | 88.8 | | 50.8 | 48.3 |
| 35. Pt-XIV.94 | 47.9 | 63.1 | 63.2 | 62.7 | 47.7 | 39.7 | 51.1 | 61.0 | 63.4 | 62.0 | | 86.1 |
| 36. Pt-II105 | 47.2 | 63.1 | 64.6 | 60.4 | 48.4 | 39.4 | 51.8 | 61.5 | 62.2 | 59.9 | 91.8 | |
| 37. Pt-123.86 | 70.9 | 48.0 | 46.6 | 48.6 | 49.7 | 47.1 | 50.7 | 46.6 | 49.0 | 50.0 | 43.9 | 42.9 |
| 38. Pt-X180 | 61.0 | 51.9 | 51.9 | 53.5 | 46.2 | 41.6 | 46.7 | 53.5 | 58.5 | 58.3 | 50.2 | 48.5 |
| 39. Pt-XII.481 | 60.0 | 50.5 | 49.5 | 46.9 | 49.5 | 41.6 | 50.0 | 50.9 | 49.5 | 49.5 | 45.1 | 42.1 |
| 40. Ck-LOB-DQ787782 | 47.2 | 72.3 | 71.4 | 68.8 | 53.4 | 44.1 | 54.7 | 71.9 | 79.4 | 78.9 | 60.6 | 62.3 |
| 41. Bn-AAP37970 | 65.2 | 52.3 | 50.8 | 47.0 | 47.7 | 44.1 | 50.0 | 50.8 | 49.6 | 51.5 | 50.4 | 49.2 |
| 42. Mt-ABE82505 | 50.3 | 70.4 | 69.1 | 67.0 | 57.4 | 46.8 | 55.1 | 71.2 | 76.9 | 78.9 | 62.7 | 62.2 |
| 43. Mt-ABE78739 | 67.2 | 50.0 | 50.0 | 50.7 | 54.7 | 43.3 | 53.2 | 48.2 | 49.6 | 48.6 | 50.0 | 48.9 |
| 44. At-LBD37-Q9FN11 | 51.4 | 66.8 | 65.6 | 64.4 | 54.2 | 47.9 | 52.9 | 67.2 | 76.0 | 74.0 | 60.8 | 60.4 |
| 45. At-LBD38-Q9SN23 | 49.7 | 65.6 | 64.4 | 60.3 | 52.3 | 44.9 | 53.6 | 66.0 | 75.3 | 72.1 | 58.7 | 61.5 |
| 46. At-LBD39-Q9SZE8 | 51.0 | 66.3 | 64.6 | 62.1 | 54.5 | 46.8 | 53.3 | 67.9 | 71.7 | 71.1 | 59.6 | 60.8 |
| 47. At-LBD40-Q9ZW96 | 61.7 | 56.7 | 55.4 | 54.9 | 49.1 | 41.0 | 49.6 | 55.8 | 55.9 | 55.4 | 50.6 | 51.5 |
| 48. At-LBD41-Q9M886 | 66.9 | 50.6 | 49.8 | 48.7 | 50.5 | 45.5 | 49.3 | 52.1 | 48.7 | 51.3 | 49.0 | 47.1 |
| 49. At-LBD42-Q9CA30 | 58.3 | 53.6 | 54.1 | 55.4 | 47.7 | 41.3 | 48.2 | 54.5 | 54.6 | 56.2 | 54.9 | 54.5 |

| | 37 | 38 | 39 | 40 | 41 | 42 | 43 | 44 | 45 | 46 |
|---|---|---|---|---|---|---|---|---|---|---|
| 1. Os-Os01g03890 | 44.0 | 39.2 | 34.8 | 35.5 | 44.4 | 34.9 | 40.5 | 31.9 | 33.3 | 32.4 |
| 2. Os-Os01g32770 | 45.3 | 38.5 | 32.3 | 32.1 | 42.7 | 33.9 | 44.8 | 30.2 | 32.1 | 29.7 |
| 3. Os-Os03g33090 | 34.7 | 36.9 | 32.7 | 53.0 | 36.4 | 54.9 | 35.1 | 50.0 | 51.2 | 49.6 |
| 4. Os-Os03g41330 | 33.7 | 35.2 | 31.2 | 43.6 | 36.2 | 44.6 | 32.6 | 43.9 | 42.4 | 40.7 |
| 5. Os-Os07g40000 | 32.8 | 35.7 | 31.9 | 49.8 | 32.6 | 51.3 | 33.1 | 49.2 | 47.4 | 48.1 |
| 6. Nb-TC9404 | 33.8 | 37.3 | 32.6 | 58.6 | 32.5 | 61.1 | 35.1 | 56.9 | 54.0 | 56.3 |
| 7. Gm-TC227562 | 32.8 | 36.4 | 32.4 | 76.6 | 34.7 | 74.9 | 37.1 | 56.2 | 57.8 | 57.3 |
| 8. Gm-TC216138 | 31.6 | 36.7 | 31.6 | 74.3 | 36.0 | 74.0 | 34.9 | 53.9 | 55.0 | 54.1 |
| 9. Hv-TC147776 | 31.1 | 38.2 | 33.5 | 50.6 | 34.3 | 50.6 | 34.5 | 49.2 | 48.6 | 45.8 |
| 10. Sb-TC104758 | 33.1 | 35.2 | 31.3 | 48.7 | 33.7 | 50.2 | 33.1 | 50.6 | 48.2 | 46.7 |
| 11. Aq-TC18561 | 33.4 | 36.2 | 32.5 | 56.7 | 36.0 | 57.8 | 36.0 | 51.6 | 55.6 | 57.1 |
| 12. Vv-TC60668 | 33.4 | 39.7 | 34.3 | 65.3 | 33.7 | 66.8 | 36.0 | 54.2 | 57.4 | 58.8 |
| 13. Lj-TC15459 | 32.1 | 35.9 | 31.0 | 70.4 | 32.8 | 70.7 | 35.3 | 52.8 | 53.0 | 54.8 |
| 14. Gh-TC30552 | 33.7 | 38.6 | 33.7 | 66.2 | 35.2 | 69.0 | 32.9 | 62.4 | 63.5 | 58.7 |
| 15. Ta-TC235711 | 45.3 | 42.7 | 36.2 | 35.4 | 46.0 | 38.3 | 46.6 | 34.1 | 35.9 | 33.7 |
| 16. St-TC133081 | 55.7 | 45.6 | 37.3 | 36.5 | 55.8 | 37.2 | 54.9 | 37.1 | 35.8 | 36.5 |
| 17. Mt-TC107091 | 63.7 | 43.0 | 37.3 | 34.2 | 54.3 | 33.9 | 60.6 | 33.4 | 37.2 | 34.2 |
| 18. Hv-TC147808 | 45.0 | 41.9 | 34.3 | 34.3 | 45.2 | 37.4 | 46.8 | 32.4 | 35.4 | 32.8 |
| 19. Vv-TC55931 | 52.0 | 51.4 | 40.9 | 36.8 | 49.8 | 38.7 | 48.9 | 37.4 | 34.9 | 36.7 |
| 20. St-TC162239 | 41.6 | 45.1 | 39.7 | 36.3 | 41.8 | 36.0 | 42.9 | 35.4 | 35.7 | 35.0 |
| 21. Pta-TC69225 | 37.6 | 33.4 | 29.4 | 33.4 | 34.7 | 32.3 | 38.0 | 31.7 | 31.1 | 32.5 |
| 22. Pta-TC67269 | 38.8 | 36.8 | 31.2 | 30.4 | 35.7 | 31.2 | 38.1 | 31.3 | 32.3 | 31.3 |
| 23. Gm-TC220806 | 48.7 | 48.8 | 40.1 | 39.7 | 48.1 | 37.9 | 51.3 | 36.5 | 38.0 | 38.4 |
| 24. Ta-TC270332 | 31.8 | 33.3 | 29.3 | 42.5 | 32.5 | 44.2 | 32.4 | 41.5 | 40.4 | 43.7 |
| 25. Aq-TC18329 | 61.1 | 48.3 | 40.6 | 33.4 | 51.2 | 36.6 | 55.9 | 35.1 | 32.8 | 34.4 |
| 26. St-TC137193 | 34.1 | 37.3 | 35.7 | 60.9 | 33.0 | 60.0 | 34.4 | 57.3 | 55.7 | 54.1 |
| 27. St-TC133385 | 34.0 | 37.3 | 36.4 | 60.1 | 34.5 | 59.6 | 33.8 | 56.5 | 54.9 | 53.1 |
| 28. St-TC140088 | 33.3 | 36.9 | 33.5 | 53.0 | 31.4 | 51.9 | 31.9 | 48.8 | 47.0 | 49.6 |
| 29. Pa-TC14656 | 32.1 | 33.3 | 33.2 | 41.1 | 29.3 | 41.7 | 32.8 | 39.0 | 40.0 | 39.9 |
| 30. Pta-TC59178 | 34.0 | 30.3 | 28.3 | 37.4 | 32.8 | 38.4 | 30.2 | 36.5 | 35.7 | 37.6 |
| 31. Pta-TC67974 | 33.2 | 34.2 | 34.1 | 42.2 | 31.9 | 41.9 | 34.2 | 40.9 | 42.6 | 40.4 |
| 32. Le-TC178827 | 32.8 | 38.9 | 36.5 | 60.8 | 34.1 | 60.7 | 33.1 | 56.5 | 55.5 | 55.3 |
| 33. Pt-III.589 | 34.7 | 37.9 | 33.5 | 67.1 | 35.5 | 65.7 | 32.7 | 64.1 | 63.9 | 57.5 |
| 34. Pt-V.543 | 34.3 | 36.6 | 33.3 | 67.4 | 34.5 | 66.7 | 32.0 | 62.6 | 62.9 | 59.3 |
| 35. Pt-XIV.94 | 31.8 | 35.8 | 30.4 | 49.4 | 36.0 | 51.7 | 37.1 | 45.0 | 45.3 | 46.5 |
| 36. Pt-II105 | 32.4 | 35.0 | 30.4 | 48.5 | 36.7 | 51.1 | 35.6 | 43.6 | 45.7 | 48.1 |
| 37. Pt-123.86 | | 45.8 | 39.3 | 33.1 | 56.2 | 34.3 | 55.9 | 34.8 | 34.1 | 33.0 |
| 38. Pt-X180 | 56.4 | | 43.1 | 34.6 | 42.3 | 34.9 | 44.1 | 37.2 | 37.3 | 39.9 |
| 39. Pt-XII.481 | 55.4 | 56.8 | | 32.5 | 37.5 | 33.6 | 37.4 | 31.9 | 30.5 | 29.9 |
| 40. Ck-LOB-DQ787782 | 49.0 | 53.9 | 47.3 | | 35.5 | 80.9 | 33.8 | 54.0 | 55.8 | 57.8 |
| 41. Bn-AAP37970 | 70.3 | 56.8 | 55.7 | 51.5 | | 37.7 | 51.6 | 33.2 | 34.1 | 34.3 |
| 42. Mt-ABE82505 | 47.0 | 55.2 | 47.3 | 87.1 | 51.9 | | 36.7 | 55.6 | 57.3 | 56.7 |
| 43. Mt-ABE78739 | 67.6 | 57.9 | 55.4 | 50.7 | 64.7 | 51.4 | | 31.9 | 32.7 | 34.3 |
| 44. At-LBD37-Q9FN11 | 53.0 | 53.2 | 48.0 | 69.2 | 50.4 | 66.8 | 50.0 | | 76.9 | 55.3 |
| 45. At-LBD38-Q9SN23 | 47.0 | 55.9 | 49.5 | 70.0 | 51.5 | 69.2 | 48.6 | 86.4 | | 56.8 |
| 46. At-LBD39-Q9SZE8 | 49.0 | 57.3 | 49.1 | 72.5 | 53.8 | 71.3 | 51.1 | 67.2 | 68.8 | |
| 47. At-LBD40-Q9ZW96 | 65.5 | 62.7 | 52.0 | 55.8 | 68.9 | 56.2 | 66.2 | 55.2 | 55.5 | 56.3 |
| 48. At-LBD41-Q9M886 | 70.9 | 58.6 | 57.1 | 47.9 | 90.5 | 50.2 | 65.5 | 53.2 | 51.7 | 52.1 |
| 49. At-LBD42-Q9CA30 | 55.4 | 62.7 | 52.0 | 58.4 | 56.8 | 55.8 | 57.2 | 53.6 | 52.6 | 52.9 |

| | 47 | 48 | 49 |
|---|---|---|---|
| 1. Os-Os01g03890 | 41.5 | 41.3 | 38.2 |
| 2. Os-Os01g32770 | 41.5 | 44.8 | 39.0 |
| 3. Os-Os03g33090 | 40.4 | 35.0 | 40.8 |
| 4. Os-Os03g41330 | 38.2 | 33.7 | 36.0 |
| 5. Os-Os07g40000 | 40.2 | 33.8 | 36.3 |
| 6. Nb-TC9404 | 39.4 | 34.6 | 40.7 |
| 7. Gm-TC227562 | 40.8 | 35.7 | 39.8 |
| 8. Gm-TC216138 | 36.5 | 34.0 | 35.5 |
| 9. Hv-TC147776 | 38.2 | 34.6 | 37.7 |
| 10. Sb-TC104758 | 36.2 | 34.5 | 38.6 |
| 11. Aq-TC18561 | 42.1 | 37.2 | 36.6 |
| 12. Vv-TC60668 | 40.2 | 36.1 | 38.2 |
| 13. Lj-TC15459 | 38.1 | 35.1 | 36.4 |
| 14. Gh-TC30552 | 39.8 | 34.6 | 36.6 |
| 15. Ta-TC235711 | 44.3 | 44.3 | 41.0 |
| 16. St-TC133081 | 50.7 | 55.9 | 45.7 |
| 17. Mt-TC107091 | 52.6 | 56.1 | 40.2 |
| 18. Hv-TC147808 | 42.1 | 46.5 | 39.7 |
| 19. Vv-TC55931 | 49.2 | 49.3 | 47.3 |
| 20. St-TC162239 | 46.5 | 44.5 | 47.5 |
| 21. Pta-TC69225 | 36.4 | 36.2 | 34.1 |
| 22. Pta-TC67269 | 36.0 | 36.3 | 33.3 |
| 23. Gm-TC220806 | 52.8 | 50.8 | 49.8 |
| 24. Ta-TC270332 | 39.2 | 30.4 | 36.3 |
| 25. Aq-TC18329 | 49.8 | 53.2 | 43.7 |
| 26. St-TC137193 | 39.2 | 34.2 | 38.6 |
| 27. St-TC133385 | 40.1 | 34.1 | 38.4 |
| 28. St-TC140088 | 37.8 | 35.7 | 36.6 |
| 29. Pa-TC14656 | 33.8 | 30.4 | 31.3 |
| 30. Pta-TC59178 | 30.2 | 32.5 | 27.2 |
| 31. Pta-TC67974 | 34.8 | 31.8 | 33.0 |
| 32. Le-TC178827 | 39.0 | 34.6 | 38.5 |
| 33. Pt-III.589 | 36.6 | 35.0 | 35.3 |
| 34. Pt-V.543 | 38.2 | 35.4 | 39.2 |
| 35. Pt-XIV.94 | 37.8 | 33.8 | 38.3 |
| 36. Pt-II105 | 40.2 | 35.7 | 37.4 |
| 37. Pt-123.86 | 53.8 | 59.1 | 43.6 |
| 38. Pt-X180 | 46.8 | 41.5 | 49.6 |
| 39. Pt-XII.481 | 38.5 | 37.6 | 36.4 |
| 40. Ck-LOB-DQ787782 | 40.2 | 31.6 | 38.2 |
| 41. Bn-AAP37970 | 55.5 | 83.5 | 42.1 |
| 42. Mt-ABE82505 | 40.3 | 33.8 | 36.8 |
| 43. Mt-ABE78739 | 53.3 | 51.6 | 43.8 |
| 44. At-LBD37-Q9FN11 | 37.5 | 34.5 | 34.9 |
| 45. At-LBD38-Q9SN23 | 40.5 | 33.5 | 34.8 |
| 46. At-LBD39-Q9SZE8 | 38.3 | 35.0 | 37.1 |
| 47. At-LBD40-Q9ZW96 | | 56.7 | 46.5 |
| 48. At-LBD41-Q9M886 | 68.4 | | 42.6 |
| 49. At-LBD42-Q9CA30 | 61.8 | 56.3 | |

### Example 4

### Identification of Domains Comprised in Polypeptide Sequences Useful in Performing the Methods of the Invention

[1090] The Integrated Resource of Protein Families, Domains and Sites (InterPro) database is an integrated interface for the commonly used signature databases for text- and sequence-based searches. The InterPro database combines these databases, which use different methodologies and varying degrees of biological information about well-characterized proteins to derive protein signatures. Collaborating databases include SWISS-PROT, PROSITE, TrEMBL, PRINTS, Propom and Pfam, Smart and TIGRFAMs. Pfam is a large collection of multiple sequence alignments and hidden Markov models covering many common protein domains and families. Pfam is hosted at the Sanger Institute server in the United Kingdom. Interpro is hosted at the European Bioinformatics Institute in the United Kingdom.

[1091] The results of the InterPro scan of the polypeptide sequence as represented by SEQ ID NO: 2 are presented in Table A3.

TABLE A3
InterPro scan results (major accession numbers) of the
polypeptide sequence as represented by SEQ ID NO: 2.

| | | | Amino acid |
|---|---|---|---|
| | Accession | Accession | coordinates on |
| Database | number | name | SEQ ID NO 2 |
| PFAM | PF03195 | DUF260 | 2-107 |
| PROFILE | PS50891 | LOB | 1-107 |

### Example 5

### Topology Prediction of the Polypeptide Sequences Useful in Performing the Methods of the Invention

[1092] TargetP 1.1 predicts the subcellular location of eukaryotic proteins. The location assignment is based on the predicted presence of any of the N-terminal pre-sequences: chloroplast transit peptide (cTP), mitochondrial targeting peptide (mTP) or secretory pathway signal peptide (SP). Scores on which the final prediction is based are not really probabilities, and they do not necessarily add to one. However, the location with the highest score is the most likely according to TargetP, and the relationship between the scores (the reliability class) may be an indication of how certain the prediction is. The reliability class (RC) ranges from 1 to 5, where 1 indicates the strongest prediction. TargetP is maintained at the server of the Technical University of Denmark.

[1093] For the sequences predicted to contain an N-terminal presequence a potential cleavage site can also be predicted.

[1094] A number of parameters were selected, such as organism group (non-plant or plant), cutoff sets (none, predefined set of cutoffs, or user-specified set of cutoffs), and the calculation of prediction of cleavage sites (yes or no).

[1095] The results of TargetP 1.1 analysis of the polypeptide sequence as represented by SEQ ID NO: 2 are presented Table A4. The “plant” organism group has been selected, no cutoffs defined, and the predicted length of the transit peptide requested,

TABLE A4
TargetP 1.1 analysis of the polypeptide sequence as
represented by SEQ ID NO: 2

| | |
|---|---|
| Length (AA) | 250 |
| Chloroplastic transit peptide | 0.026 |
| Mitochondrial transit peptide | 0.401 |
| Secretory pathway signal peptide | 0.019 |
| Other subcellular targeting | 0.573 |
| Predicted Location | / |
| Reliability class | 5 |
| Predicted transit peptide length | / |

[1096] The subcellular localization of the polypeptide sequence as represented by SEQ ID NO: 2 may be the cytoplasm or nucleus, no transit peptide is predicted. SubLoc (Hua & Sun, Bioinformatics 17, 721-728, 2001) predicts a nuclear localisation (reliability index: 2, accuracy: 74%); this prediction is in agreement with the data from Liu et al (2005).

[1097] Many other algorithms can be used to perform such analyses, including:
[1098] ChloroP 1.1 hosted on the server of the Technical University of Denmark;
[1099] Protein Prowler Subcellular Localisation Predictor version 1.2 hosted on the server of the Institute for Molecular Bioscience, University of Queensland, Brisbane, Australia;
[1100] PENCE Proteome Analyst PA-GOSUB 2.5 hosted on the server of the University of Alberta, Edmonton, Alberta, Canada;
[1101] TMHMM, hosted on the server of the Technical University of Denmark

### Example 6

### Cloning of the LSD Nucleic Acid Sequence Used in the Methods of the Invention

[1102] The nucleic acid sequence used in the methods of the invention was amplified by PCR using as template a custom-made Arabidopsis thaliana seedlings cDNA library (in pCMV Sport 6.0; Invitrogen, Paisley, UK). PCR was performed using Hifi Taq DNA polymerase in standard conditions, using 200 ng of template in a 50 μl PCR mix. The primers used were prm009067 (SEQ ID NO: 3; sense, start codon in bold):

5′-ggggacaagtttgtacaaaaaagcaggcttaaacaatgagctgc
aatggttgc-3′

and prm009068 (SEQ ID NO: 4; reverse, complementary):

5′-ggggaccactttgtacaagaaagctgggtactaactctgagaaaa
ccgcc-3′,

which include the AttB sites for Gateway recombination. The amplified PCR fragment was purified also using standard methods. The first step of the Gateway procedure, the BP reaction, was then performed, during which the PCR fragment recombines in vivo with the pDONR201 plasmid to produce, according to the Gateway terminology, an “entry clone”, pLBD. Plasmid pDONR201 was purchased from invitrogen, as part of the Gateway® technology.

[1103] The entry clone comprising SEQ ID NO: 1 was then used in an LR reaction with a destination vector used for Oryza sativa transformation. This vector contained as functional elements within the T-DNA borders: a plant selectable marker; a screenable marker expression cassette; and a Gateway cassette intended for LR in vivo recombination with the nucleic acid sequence of interest already cloned in the entry clone. A rice GOS2 promoter (SEQ ID NO: 10) for root specific expression was located upstream of this Gateway cassette.

[1104] After the LR recombination step, the resulting expression vector pGOS2::LBD (FIG. 4) was transformed into Agrobacterium strain LBA4044 according to methods well known in the art.

### Example 7

### Plant Transformation

### Rice Transformation

[1105] The Agrobacterium containing the expression vector was used to transform Oryza sativa plants. Mature dry seeds of the rice japonica cultivar Nipponbare were dehusked. Sterilization was carried out by incubating for one minute in 70% ethanol, followed by 30 minutes in 0.2% HgCl₂, followed by a 6 times 15 minutes wash with sterile distilled water. The sterile seeds were then germinated on a medium containing 2,4-D (callus induction medium). After incubation in the dark for four weeks, embryogenic, scutellum-derived calli were excised and propagated on the same medium. After two weeks, the calli were multiplied or propagated by subculture on the same medium for another 2 weeks. Embryogenic callus pieces were subcultured on fresh medium 3 days before co-cultivation (to boost cell division activity).

[1106] Agrobacterium strain LBA4404 containing the expression vector was used for co-cultivation. Agrobacterium was inoculated on AB medium with the appropriate antibiotics and cultured for 3 days at 28° C. The bacteria were then collected and suspended in liquid co-cultivation medium to a density (OD₆₀₀) of about 1. The suspension was then transferred to a Petri dish and the calli immersed in the suspension for 15 minutes. The callus tissues were then blotted dry on a filter paper and transferred to solidified, co-cultivation medium and incubated for 3 days in the dark at 25° C. Co-cultivated calli were grown on 2,4-D-containing medium for 4 weeks in the dark at 28° C. in the presence of a selection agent. During this period, rapidly growing resistant callus islands developed. After transfer of this material to a regeneration medium and incubation in the light, the embryogenic potential was released and shoots developed in the next four to five weeks. Shoots were excised from the calli and incubated for 2 to 3 weeks on an auxin-containing medium from which they were transferred to soil. Hardened shoots were grown under high humidity and short days in a greenhouse.

[1107] Approximately 35 independent T0 rice transformants were generated for one construct. The primary transformants were transferred from a tissue culture chamber to a greenhouse. After a quantitative PCR analysis to verify copy number of the T-DNA insert, only single copy transgenic plants that exhibit tolerance to the selection agent were kept for harvest of T1 seed. Seeds were then harvested three to five months after transplanting. The method yielded single locus transformants at a rate of over 50% (Aldemita and Hodges1996, Chan et al. 1993, Hiei et al. 1994).

### Corn Transformation

[1108] Transformation of maize (Zea mays) is performed with a modification of the method described by Ishida et al. (1996) Nature Biotech 14(6): 745-50. Transformation is genotype-dependent in corn and only specific genotypes are amenable to transformation and regeneration. The inbred line A188 (University of Minnesota) or hybrids with A188 as a parent are good sources of donor material for transformation, but other genotypes can be used successfully as well. Ears are harvested from corn plant approximately 11 days after pollination (DAP) when the length of the immature embryo is about 1 to 1.2 mm. Immature embryos are cocultivated with Agrobacterium tumefaciens containing the expression vector, and transgenic plants are recovered through organogenesis. Excised embryos are grown on callus induction medium, then maize regeneration medium, containing the selection agent (for example imidazolinone but various selection markers can be used). The Petri plates are incubated in the light at 25° C. for 2-3 weeks, or until shoots develop. The green shoots are transferred from each embryo to maize rooting medium and incubated at 25° C. for 2-3 weeks, until roots develop. The rooted shoots are transplanted to soil in the greenhouse. T1 seeds are produced from plants that exhibit tolerance to the selection agent and that contain a single copy of the T-DNA insert.

### Wheat Transformation

[1109] Transformation of wheat is performed with the method described by Ishida et al. (1996) Nature Biotech 14(6): 745-50. The cultivar Bobwhite (available from CIMMYT, Mexico) is commonly used in transformation. Immature embryos are co-cultivated with Agrobacterium tumefaciens containing the expression vector, and transgenic plants are recovered through organogenesis. After incubation with Agrobacterium, the embryos are grown in vitro on callus induction medium, then regeneration medium, containing the selection agent (for example imidazolinone but various selection markers can be used). The Petri plates are incubated in the light at 25° C. for 2-3 weeks, or until shoots develop. The green shoots are transferred from each embryo to rooting medium and incubated at 25° C. for 2-3 weeks, until roots develop. The rooted shoots are transplanted to soil in the greenhouse. T1 seeds are produced from plants that exhibit tolerance to the selection agent and that contain a single copy of the T-DNA insert.

### Soybean Transformation

[1110] Soybean is transformed according to a modification of the method described in the Texas A&M U.S. Pat. No. 5,164,310. Several commercial soybean varieties are amenable to transformation by this method. The cultivar Jack (available from the Illinois Seed foundation) is commonly used for transformation. Soybean seeds are sterilised for in vitro sowing. The hypocotyl, the radicle and one cotyledon are excised from seven-day old young seedlings. The epicotyl and the remaining cotyledon are further grown to develop axillary nodes. These axillary nodes are excised and incubated with Agrobacterium tumefaciens containing the expression vector. After the cocultivation treatment, the explants are washed and transferred to selection media. Regenerated shoots are excised and placed on a shoot elongation medium. Shoots no longer than 1 cm are placed on rooting medium until roots develop. The rooted shoots are transplanted to soil in the greenhouse. T1 seeds are produced from plants that exhibit tolerance to the selection agent and that contain a single copy of the T-DNA insert.

### Rapeseed/Canola Transformation

[1111] Cotyledonary petioles and hypocotyls of 5-6 day old young seedling are used as explants for tissue culture and transformed according to Babic et al. (1998, Plant Cell Rep 17: 183-188). The commercial cultivar Westar (Agriculture Canada) is the standard variety used for transformation, but other varieties can also be used. Canola seeds are surface-sterilized for in vitro sowing. The cotyledon petiole explants with the cotyledon attached are excised from the in vitro seedlings, and inoculated with Agrobacterium (containing the expression vector) by dipping the cut end of the petiole explant into the bacterial suspension. The explants are then cultured for 2 days on MSBAP-3 medium containing 3 mg/l BAP, 3% sucrose, 0.7 Phytagar at 23° C., 16 hr light. After two days of co-cultivation with Agrobacterium, the petiole explants are transferred to MSBAP-3 medium containing 3 mg/l BAP, cefotaxime, carbenicillin, or timentin (300 mg/l) for 7 days, and then cultured on MSBAP-3 medium with cefotaxime, carbenicillin, or timentin and selection agent until shoot regeneration. When the shoots are 5-10 mm in length, they are cut and transferred to shoot elongation medium (MSBAP-0.5, containing 0.5 mg/l BAP). Shoots of about 2 cm in length are transferred to the rooting medium (MS0) for root induction. The rooted shoots are transplanted to soil in the greenhouse. T1 seeds are produced from plants that exhibit tolerance to the selection agent and that contain a single copy of the T-DNA insert.

### Alfalfa Transformation

[1112] A regenerating clone of alfalfa (Medicago sativa) is transformed using the method of (McKersie et al., 1999 Plant Physiol 119: 839-847). Regeneration and transformation of alfalfa is genotype dependent and therefore a regenerating plant is required. Methods to obtain regenerating plants have been described. For example, these can be selected from the cultivar Rangelander (Agriculture Canada) or any other commercial alfalfa variety as described by Brown D C W and A Atanassov (1985. Plant Cell Tissue Organ Culture 4: 111-112). Alternatively, the RA3 variety (University of Wisconsin) has been selected for use in tissue culture (Walker et al., 1978 Am J Bot 65:654-659). Petiole explants are cocultivated with an overnight culture of Agrobacterium tumefaciens C58C1 pMP90 (McKersie et al., 1999 Plant Physiol 119: 839-847) or LBA4404 containing the expression vector. The explants are cocultivated for 3 d in the dark on SH induction medium containing 288 mg/L Pro, 53 mg/L thioproline, 4.35 g/L K₂SO₄, and 100 μm acetosyringinone. The explants are washed in half-strength Murashige-Skoog medium (Murashige and Skoog, 1962) and plated on the same SH induction medium without acetosyringinone but with a suitable selection agent and suitable antibiotic to inhibit Agrobacterium growth. After several weeks, somatic embryos are transferred to BOi2Y development medium containing no growth regulators, no antibiotics, and 50 g/L sucrose. Somatic embryos are subsequently germinated on half-strength Murashige-Skoog medium. Rooted seedlings were transplanted into pots and grown in a greenhouse. T1 seeds are produced from plants that exhibit tolerance to the selection agent and that contain a single copy of the T-DNA insert.

### Cotton Transformation

[1113] Cotton (Gossypium hirsutum L) transformation is performed using Agrobacterium tumefaciens, on hypocotyls explants. The commercial cultivars such as Coker 130 or Coker 312 (SeedCo, Lubbock, Tex.) are standard varieties used for transformation, but other varieties can also be used. The seeds are surface sterilized and germinated in the dark. Hypocotyl explants are cut from the germinated seedlings to lengths of about 1-1.5 centimeter. The hypotocyl explant is submersed in the Agrobacterium tumefaciens inoculum containing the expression vector, for 5 minutes then co-cultivated for about 48 hours on MS+1.8 mg/l KNO3+2% glucose at 24° C., in the dark. The explants are transferred the same medium containing appropriate bacterial and plant selectable markers (renewed several times), until embryogenic calli is seen. The calli are separated and subcultured until somatic embryos appear. Plantlets derived from the somatic embryos are matured on rooting medium until roots develop. The rooted shoots are transplanted to potting soil in the greenhouse. T1 seeds are produced from plants that exhibit tolerance to the selection agent and that contain a single copy of the T-DNA insert.

### Example 8

### Phenotypic Evaluation Procedure

### 8.1 Evaluation Setup

[1114] Approximately 35 independent T0 rice transformants were generated. The primary transformants were transferred from a tissue culture chamber to a greenhouse for growing and harvest of T1 seed. Six events, of which the T1 progeny segregated 3:1 for presence/absence of the transgene, were retained. For each of these events, approximately 10 T1 seedlings containing the transgene (hetero- and homo-zygotes) and approximately 10 T1 seedlings lacking the transgene (nullizygotes) were selected by monitoring visual marker expression. The transgenic plants and the corresponding nullizygotes were grown side-by-side at random positions. Greenhouse conditions were of shorts days (12 hours light), 28° C. in the light and 22° C. in the dark, and a relative humidity of 70%. Plants grown under non-stress conditions are supplied with water at regular intervals to ensure that water and nutrients are not limiting to satisfy plant needs to complete growth and development.

### Nitrogen Use Efficiency Screen

[1115] Rice plants from T2 seeds were grown in potting soil under normal conditions except for the nutrient solution. The pots were watered from transplantation to maturation with a specific nutrient solution containing reduced N nitrogen (N) content, usually between 7 to 8 times less. The rest of the cultivation (plant maturation, seed harvest) was the same as for plants not grown under abiotic stress. Growth and yield parameters are recorded as detailed for growth under normal conditions.

### 8.2 Statistical Analysis: F Test

[1116] A two factor ANOVA (analysis of variants) was used as a statistical model for the overall evaluation of plant phenotypic characteristics. An F test was carried out on all the parameters measured of all the plants of all the events transformed with the gene of the present invention. The F test was carried out to check for an effect of the gene over all the transformation events and to verify for an overall effect of the gene, also known as a global gene effect. The threshold for significance for a true global gene effect was set at a 5% probability level for the F test. A significant F test value points to a gene effect, meaning that it is not only the mere presence or position of the gene that is causing the differences in phenotype.

### 8.3 Parameters Measured

### Biomass-Related Parameter Measurement

[1117] From the stage of sowing until the stage of maturity the plants were passed several times through a digital imaging cabinet. At each time point digital images (2048×1536 pixels, 16 million colours) were taken of each plant from at least 6 different angles.

[1118] The plant aboveground area (or leafy biomass) was determined by counting the total number of pixels on the digital images from aboveground plant parts discriminated from the background. This value was averaged for the pictures taken on the same time point from the different angles and was converted to a physical surface value expressed in square mm by calibration. Experiments show that the aboveground plant area measured this way correlates with the biomass of plant parts above ground. The above ground area is the area measured at the time point at which the plant had reached its maximal leafy biomass. Early vigour was determined by counting the total number of pixels from aboveground plant parts discriminated from the background. This value was averaged for the pictures taken on the same time point from different angles and was converted to a physical surface value expressed in square mm by calibration. The results described below are for plants three weeks post-germination.

### Seed-Related Parameter Measurements

[1119] The mature primary panicles were harvested, counted, bagged, barcode-labelled and then dried for three days in an oven at 37° C. The panicles were then threshed and all the seeds were collected and counted. The filled husks were separated from the empty ones using an air-blowing device. The empty husks were discarded and the remaining fraction was counted again. The filled husks were weighed on an analytical balance. The number of filled seeds was determined by counting the number of filled husks that remained after the separation step. The total seed yield was measured by weighing all filled husks harvested from a plant. Total seed number per plant was measured by counting the number of husks harvested from a plant. Thousand Kernel Weight (TKW) is extrapolated from the number of filled seeds counted and their total weight. The Harvest Index (HI) in the present invention is defined as the ratio between the total seed yield and the above ground area (mm²), multiplied by a factor 10⁶. The seed fill rate as defined in the present invention is the proportion (expressed as a %) of the number of filled seeds over the total number of seeds (or florets).

### Example 9

### Results of the Phenotypic Evaluation of the Transgenic Plants Comprising SEQ ID NO: 1

[1120] The evaluation of transgenic rice plants expressing a LBD nucleic acid under non-stress conditions showed that there was an increase of more than 5% for aboveground biomass (AreaMax), total seed yield, number of filled seeds, fill rate, harvest index, and more than 3% for thousand kernel weight.

[1121] The evaluation of transgenic rice plants expressing a LBD nucleic acid in the nitrogen use efficiency screen revealed an increase of more than 5% for emergence vigour (early vigour).

### Example 10

### Results of the Phenotypic Evaluation of the Transgenic Plants Comprising SEQ ID NO: 71

[1122] The coding region comprised in SEQ ID NO: 71 was cloned under the control of the rice GOS2 promoter into a rice transformation vector as described in Example 6. Transgenic rice plants comprising the coding region of SEQ ID NO: 71 were generated following the procedures of Example 7. Plants were evaluated according to the procedure described in Example 8. SEQ ID NO: 71 encodes the LBD protein represented by SEQ ID NO: 25.

[1123] The evaluation of transgenic rice plants expressing SEQ ID NO: 71 under non-stress conditions showed that there was an increase of more than 5% for aboveground biomass (AreaMax), the number of flowers per panicle, the total number of seeds per plant, and more than 3% for thousand kernel weight.

### Example 11

### Results of the Phenotypic Evaluation of the Transgenic Plants Comprising SEQ ID NO: 72

[1124] The coding region comprised in SEQ ID NO: 72 was cloned under the control of the rice GOS2 promoter into a rice transformation vector as described in Example 6. Transgenic rice plants comprising the coding region of SEQ ID NO: 72 were generated following the procedures of Example 7. Plants were evaluated according to the procedure described in Example 8. SEQ ID NO: 72 encodes the LBD protein represented by SEQ ID NO: 52.

[1125] The evaluation of transgenic rice plants expressing SEQ ID NO: 72 under non-stress conditions showed that there was an increase of more than 5% for aboveground biomass (AreaMax), seed weight per plant, number of filled seeds, the number of flowers per panicle, the total number of seeds per plant, harvest index and more than 3% for thousand kernel weight.

[1126] The evaluation of transgenic rice plants expressing SEQ ID NO: 72 in the nitrogen use efficiency screen revealed an increase of more than 5% for the aboveground biomass (AreaMax).

### II. JMJC (JUMONJI-C) Polypeptide

### Example 12

### Identification of Sequences Related to the JMJC Nucleic Acid Sequence Used in the Methods of the Invention

[1127] Sequences (full length cDNA, ESTs or genomic) related to the nucleic acid sequence used in the methods of the present invention were identified amongst those maintained in the Entrez Nucleotides database at the National Center for Biotechnology Information (NCB)) using database sequence search tools, such as the Basic Local Alignment Tool (BLAST) (Altschul et al. (1990) J. Mol. Biol. 215:403-410; and Altschul et al. (1997) Nucleic Acids Res. 25:3389-3402). The program is used to find regions of local similarity between sequences by comparing nucleic acid or polypeptide sequences to sequence databases and by calculating the statistical significance of matches. For example, the polypeptide encoded by the nucleic acid used in the present invention was used for the TBLASTN algorithm, with default settings and the filter to ignore low complexity sequences set off. The output of the analysis was viewed by pairwise comparison, and ranked according to the probability score (E-value), where the score reflect the probability that a particular alignment occurs by chance (the lower the E-value, the more significant the hit). In addition to E-values, comparisons were also scored by percentage identity. Percentage identity refers to the number of identical nucleotides (or amino acids) between the two compared nucleic acid (or polypeptide) sequences over a particular length.

[1128] Table 81 provides a list of nucleic acid sequences related to the JMJC nucleic acid sequence used in the methods of the present invention. Polypeptides with an accession extended by a dot and one digit represent splice variants.

TABLE B1
Examples of JMJC polypeptides

| | Genbank | | Protein |
|---|---|---|---|
| | accession | Nucleic acid | SEQ ID |
| Plant Source | (or locus) number | SEQ ID NO: | NO: |
| Arabidopsis thaliana | AT3G20810 | 73 | 74 |
| Arabidopsis thaliana | AT3G20810 | 83 | 84 |
| Arabidopsis thaliana | AT5G19840 | 85 | 86 |
| Arabidopsis thaliana | AT3G45880 | 87 | 88 |
| Medicago truncatula | ABE92082 | 89 | 90 |
| Brachypodium sylvaticum | CAJ26373 | 91 | 92 |
| Oryza sativa | Os09g0483600 | 93 | 94 |
| Arabidopsis thaliana | AT1G08620 | 95 | 96 |
| Arabidopsis thaliana | AT1G09060 | 97 | 98 |
| Arabidopsis thaliana | AT1G09060 | 99 | 100 |
| Arabidopsis thaliana | AT1G09060 | 101 | 102 |
| Arabidopsis thaliana | AT1G11950 | 103 | 104 |
| Arabidopsis thaliana | AT1G30810 | 105 | 106 |
| Arabidopsis thaliana | AT1G62310 | 107 | 108 |
| Arabidopsis thaliana | AT1G63490 | 109 | 110 |
| Arabidopsis thaliana | AT1G78280 | 111 | 112 |
| Arabidopsis thaliana | AT2G34880 | 113 | 114 |
| Arabidopsis thaliana | AT2G38950 | 115 | 116 |
| Arabidopsis thaliana | AT3G07610 | 117 | 118 |
| Arabidopsis thaliana | AT3G48430 | 119 | 120 |
| Arabidopsis thaliana | AT4G00990 | 121 | 122 |
| Arabidopsis thaliana | AT4G20400 | 123 | 124 |
| Arabidopsis thaliana | AT4G20400 | 125 | 126 |
| Arabidopsis thaliana | AT5G04240 | 127 | 128 |
| Arabidopsis thaliana | AT5G06550 | 129 | 130 |
| Arabidopsis thaliana | AT5G46910 | 131 | 132 |
| Arabidopsis thaliana | AT5G63080 | 133 | 134 |
| Oryza sativa | Os01g36630 | 135 | 136 |
| Oryza sativa | Os01g67970 | 137 | 138 |
| Oryza sativa | Os02g01940 | 139 | 140 |
| Oryza sativa | Os02g58210 | 141 | 142 |
| Oryza sativa | Os02g58210 | 143 | 144 |
| Oryza sativa | Os03g05680 | 145 | 146 |
| Oryza sativa | Os03g22540 | 147 | 148 |
| Oryza sativa | Os03g27250 | 149 | 150 |
| Oryza sativa | Os03g31594 | 151 | 152 |
| Oryza sativa | Os03g31594 | 153 | 154 |
| Oryza sativa | Os05g10770 | 155 | 156 |
| Oryza sativa | Os05g23670 | 157 | 158 |
| Oryza sativa | Os09g22540 | 159 | 160 |
| Oryza sativa | Os10g42690 | 161 | 162 |
| Oryza sativa | Os11g36450 | 163 | 164 |
| Oryza sativa | Os12g18149 | 165 | 166 |
| Oryza sativa | Os12g18150 | 167 | 168 |
| Glycine max | Gm_JMJ_1 | 169 | 170 |

[1129] In some instances, related sequences have tentatively been assembled and publicly disclosed by research institutions, such as The Institute for Genomic Research (TIGR). The Eukaryotic Gene Orthologs (EGO) database may be used to identify such related sequences, either by keyword search or by using the BLAST algorithm with the nucleic acid or polypeptide sequence of interest.

### Example 13

### Alignment of JMJC Polypeptide Sequences

[1130] Alignment of polypeptide sequences was performed using the AlignX programme from the Vector NTI (Invitrogen) which is based on the popular Clustal W algorithm of progressive alignment (Thompson et al. (1997) Nucleic Acids Res 25:4876-4882; Chema et al. (2003). Nucleic Acids Res 31:3497-3500). Default values are for the gap open penalty of 10, for the gap extension penalty of 0,1 and the selected weight matrix is Blosum 62 (if polypeptides are aligned). Minor manual editing may be done to further optimise the alignment. Sequence conservation among JMJC polypeptides is mostly in the JmjC domain of the polypeptides. The region corresponding to the motifs represented by SEQ ID NO: 79 and by SEQ ID NO: 81 is more conserved than that of motif 8. A consensus sequence is given. Amino acid residues in the consensus sequences are highly conserved. Blanks in the conserved sequences represent any amino acid. The JMJC polypeptides are aligned in FIG. 7.

### Example 14

### Calculation of Global Percentage Identity Between JMJC Polypeptide Sequences Useful in Performing the Methods of the Invention

[1131] Global percentages of similarity and identity between full length polypeptide sequences useful in performing the methods of the invention were determined using one of the methods available in the art, the MatGAT (Matrix Global Alignment Tool) software (BMC Bioinformatics. 2003 4:29. MatGAT: an application that generates similarity/identity matrices using protein or DNA sequences. Campanella J J, Bitincka L, Smalley J; software hosted by Ledion Bitincka). MatGAT software generates similarity/identity matrices for DNA or protein sequences without needing pre-alignment of the data. The program performs a series of pair-wise alignments using the Myers and Miller global alignment algorithm (with a gap opening penalty of 12, and a gap extension penalty of 2), calculates similarity and identity using for example Blosum 62 (for polypeptides), and then places the results in a distance matrix. Sequence similarity is shown in the bottom half of the dividing line and sequence identity is shown in the top half of the diagonal dividing line.

[1132] Parameters used in the comparison were:
[1133] Scoring matrix: Blosum62
[1134] First Gap: 12
[1135] Extending gap: 2

[1136] Results of the software analysis are shown in Table B2 for the global similarity and identity over the full length of the polypeptide sequences. Percentage identity is given above the diagonal in bold and percentage similarity is given below the diagonal (normal face).

[1137] The percentage identity between the JMJC polypeptide sequences useful in performing the methods of the invention can be as low as 15% amino acid identity compared to SEQ ID NO: 74.

TABLE B2
MatGAT results for global similarity and identity over the full length of the
polypeptide sequences.

| | | SEQ ID | SEQ ID | SEQ ID | SEQ ID | SEQ ID | SEQ ID | SEQ ID |
|---|---|---|---|---|---|---|---|---|
| | | NO: 74 | NO: 84 | NO: 86 | NO: 90 | NO: 92 | NO: 94 | NO: 136 |
| AT3G20810.1 | SEQ ID NO: 74 | | 97.4 | 16.1 | 15.5 | 16.9 | 17.3 | 15.5 |
| AT3G20810.2 | SEQ ID NO: 84 | 97.4 | | 15.5 | 14.5 | 17.5 | 17.1 | 14.9 |
| AT5G19840 | SEQ ID NO: 86 | 30.3 | 30.7 | | 16.9 | 17 | 16.9 | 16.9 |
| ABE92082 | SEQ ID NO: 90 | 28.2 | 27.7 | 28.5 | | 51.8 | 51.7 | 17.3 |
| CAJ26373 | SEQ ID NO: 92 | 30.1 | 29.6 | 27.7 | 67.6 | | 82.5 | 12.4 |
| Os09g0483600 | SEQ ID NO: 94 | 30.1 | 30.1 | 27.5 | 67.3 | 89.6 | | 16.1 |
| Os01g36630 | SEQ ID NO: 136 | 33.7 | 31.2 | 32.9 | 34.2 | 29.1 | 29.6 | |

### Example 15

### Identification of Domains Comprised in JMJC Polypeptide Sequences Useful in Performing the Methods of the Invention

[1138] The Integrated Resource of Protein Families, Domains and Sites (InterPro) database is an integrated interface for the commonly used signature databases for text- and sequence-based searches. The InterPro database combines these databases, which use different methodologies and varying degrees of biological information about well-characterized proteins to derive protein signatures. Collaborating databases include SWISS-PROT, PROSITE, TrEMBL, PRINTS, Propom and Pfam, Smart and TIGRFAMs. Pfam is a large collection of multiple sequence alignments and hidden Markov models covering many common protein domains and families. Pfam is hosted at the Sanger Institute server in the United Kingdom. Interpro is hosted at the European Bioinformatics Institute in the United Kingdom.

[1139] Table B3 shows the settings (Gathering cut off, trusted cut off and noise cut off) as described in the Pfam database that were used to produce the HMMs_fs for the different domains.

TABLE B3
HMMs_fs settings.

| Domain | Gathering cutoff | Trusted cutoff | Noise cutoff |
|---|---|---|---|
| PF02373 | 16 | 16.1 | 15.9 |
| PF02375 | 15 | 16.8 | 13.8 |
| PF02928 | 25 | 44.4 | 21.1 |
| PF00646 | 17.7 | 17.7 | 17.6 |
| PF00096 | 22.5 | 22.5 | 22.4 |
| PF04967 | 15.4 | 15.4 | 3 |

[1140] The results of the Pfam scan for representative AUG polypeptides of plant origin are presented in Table B4. The amino acid coordinates for each domain in the sequence of reference is indicated in the columns Start and End. The E-value of the alignment is also given. The InterPro ID accession number of each domain identified is also provided.

TABLE B4
Pfam scan results (major accession numbers) of representative JMJC polypeptides
of plant origin.

| | Genbank (genomic | | | | | | | |
|---|---|---|---|---|---|---|---|---|
| Protein | locus) accession | | | | | | | InterPro |
| SEQ ID NO: | number (name) | Database | Entry | E_value | Start | End | InterPro ID | Description |
| 96 | AT1G08620 | Pfam | PF02373 | 1.10E−62 | 368 | 484 | IPR003347 | Transcription |
| | | | | | | | | factor jumonji, |
| | | | | | | | | jmjC |
| 96 | AT1G08620 | Pfam | PF02375 | 1.50E−16 | 127 | 165 | IPR003349 | Transcription |
| | | | | | | | | factor jumonji, |
| | | | | | | | | JmjN |
| 96 | AT1G08620 | Pfam | PF02928 | 9.10E−22 | 591 | 644 | IPR004198 | Zn-finger, |
| | | | | | | | | C5HC2 type |
| 96 | AT1G08620 | SMART | SM00541 | 1.10E−17 | 962 | 1006 | IPR003888 | FY-rich domain, |
| | | | | | | | | N-terminal |
| 96 | AT1G08620 | SMART | SM00542 | 1.30E−43 | 1012 | 1106 | IPR003889 | FY-rich domain, |
| | | | | | | | | C-terminal |
| 98 | AT1G09060 | Pfam | PF02373 | 6.80E−06 | 644 | 856 | IPR003347 | Transcription |
| | | | | | | | | factor jumonji, |
| | | | | | | | | jmjC |
| 104 | AT1G11950 | Pfam | PF02373 | 1.00E−23 | 645 | 825 | IPR003347 | Transcription |
| | | | | | | | | factor jumonji, |
| | | | | | | | | jmjC |
| 106 | AT1G30810 | Pfam | PF02373 | 5.00E−30 | 294 | 378 | IPR003347 | Transcription |
| | | | | | | | | factor jumonji, |
| | | | | | | | | jmjC |
| 106 | AT1G30810 | Pfam | PF02375 | 3.10E−24 | 58 | 104 | IPR003349 | Transcription |
| | | | | | | | | factor jumonji, |
| | | | | | | | | JmjN |
| 106 | AT1G30810 | Pfam | PF02928 | 4.50E−30 | 487 | 540 | IPR004198 | Zn-finger, |
| | | | | | | | | C5HC2 type |
| 106 | AT1G30810 | SMART | SM00541 | 1.30E−17 | 626 | 670 | IPR003888 | FY-rich domain, |
| | | | | | | | | N-terminal |
| 106 | AT1G30810 | SMART | SM00542 | 1.20E−39 | 676 | 762 | IPR003889 | FY-rich domain, |
| | | | | | | | | C-terminal |
| 108 | AT1G62310 | Pfam | PF02373 | 2.00E−27 | 733 | 846 | IPR003347 | Transcription |
| | | | | | | | | factor jumonji, |
| | | | | | | | | jmjC |
| 108 | AT1G62310 | ProSite | PS50089 | 10.173 | 209 | 256 | IPR001841 | Zn-finger, RING |
| 110 | AT1G63490 | Pfam | PF00628 | 5.40E−08 | 1009 | 1053 | IPR001965 | Zn-finger-like, |
| | | | | | | | | PHD finger |
| 110 | AT1G63490 | Pfam | PF02373 | 3.10E−60 | 66 | 182 | IPR003347 | Transcription |
| | | | | | | | | factor jumonji, |
| | | | | | | | | jmjC |
| 110 | AT1G63490 | Pfam | PF02928 | 4.80E−33 | 276 | 329 | IPR004198 | Zn-finger, |
| | | | | | | | | C5HC2 type |
| 112 | AT1G78280 | Pfam | PF00646 | 0.00012 | 15 | 62 | IPR001810 | Cyclin-like F- |
| | | | | | | | | box |
| 112 | AT1G78280 | Pfam | PF02373 | 4.10E−12 | 249 | 362 | IPR003347 | Transcription |
| | | | | | | | | factor jumonji, |
| | | | | | | | | jmjC |
| 112 | AT1G78280 | ProSite | PS50181 | 9.603 | 14 | 60 | IPR001810 | Cyclin-like F- |
| | | | | | | | | box |
| 114 | AT2G34880 | Pfam | PF02373 | 1.50E−67 | 294 | 410 | IPR003347 | Transcription |
| | | | | | | | | factor jumonji, |
| | | | | | | | | jmjC |
| 114 | AT2G34880 | Pfam | PF02375 | 3.70E−29 | 60 | 106 | IPR003349 | Transcription |
| | | | | | | | | factor jumonji, |
| | | | | | | | | JmjN |
| 114 | AT2G34880 | Pfam | PF02928 | 1.40E−23 | 514 | 567 | IPR004198 | Zn-finger, |
| | | | | | | | | C5HC2 type |
| 114 | AT2G34880 | SMART | SM00541 | 9.90E−17 | 643 | 687 | IPR003888 | FY-rich domain, |
| | | | | | | | | N-terminal |
| 114 | AT2G34880 | SMART | SM00542 | 4.60E−39 | 693 | 781 | IPR003889 | FY-rich domain, |
| | | | | | | | | C-terminal |
| 116 | AT2G38950 | Pfam | PF02373 | 4.60E−47 | 321 | 437 | IPR003347 | Transcription |
| | | | | | | | | factor jumonji, |
| | | | | | | | | jmjC |
| 116 | AT2G38950 | Pfam | PF02375 | 9.30E−28 | 107 | 153 | IPR003349 | Transcription |
| | | | | | | | | factor jumonji, |
| | | | | | | | | JmjN |
| 116 | AT2G38950 | Pfam | PF02928 | 5.90E−27 | 544 | 597 | IPR004198 | Zn-finger, |
| | | | | | | | | C5HC2 type |
| 118 | AT3G07610 | Pfam | PF02373 | 3.40E−15 | 726 | 843 | IPR003347 | Transcription |
| | | | | | | | | factor jumonji, |
| | | | | | | | | jmjC |
| 120 | AT3G48430 | Pfam | PF00096 | 0.014 | 1243 | 1268 | IPR007087 | Zn-finger, C2H2 |
| | | | | | | | | type |
| 120 | AT3G48430 | Pfam | PF00096 | 0.0022 | 1296 | 1320 | IPR007087 | Zn-finger, C2H2 |
| | | | | | | | | type |
| 120 | AT3G48430 | Pfam | PF00096 | 0.00026 | 1326 | 1352 | IPR007087 | Zn-finger, C2H2 |
| | | | | | | | | type |
| 120 | AT3G48430 | Pfam | PF02373 | 9.00E−52 | 233 | 352 | IPR003347 | Transcription |
| | | | | | | | | factor jumonji, |
| | | | | | | | | jmjC |
| 120 | AT3G48430 | Pfam | PF02375 | 1.30E−07 | 19 | 62 | IPR003349 | Transcription |
| | | | | | | | | factor jumonji, |
| | | | | | | | | JmjN |
| 120 | AT3G48430 | ProSite | PS00028 | 0.00008 | 1268 | 1290 | IPR007087 | Zn-finger, C2H2 |
| | | | | | | | | type |
| 122 | AT4G00990 | Pfam | PF02373 | 2.80E−16 | 607 | 781 | IPR003347 | Transcription |
| | | | | | | | | factor jumonji, |
| | | | | | | | | jmjC |
| 124 | AT4G20400 | Pfam | PF02373 | 4.60E−68 | 239 | 355 | IPR003347 | Transcription |
| | | | | | | | | factor jumonji, |
| | | | | | | | | jmjC |
| 124 | AT4G20400 | Pfam | PF02375 | 9.60E−11 | 7 | 44 | IPR003349 | Transcription |
| | | | | | | | | factor jumonji, |
| | | | | | | | | JmjN |
| 124 | AT4G20400 | Pfam | PF02928 | 5.70E−30 | 462 | 515 | IPR004198 | Zn-finger, |
| | | | | | | | | C5HC2 type |
| 124 | AT4G20400 | SMART | SM00541 | 4.40E−15 | 683 | 727 | IPR003888 | FY-rich domain, |
| | | | | | | | | N-terminal |
| 124 | AT4G20400 | SMART | SM00542 | 7.40E−41 | 733 | 830 | IPR003889 | FY-rich domain, |
| | | | | | | | | C-terminal |
| 128 | AT5G04240 | Pfam | PF00096 | 0.41 | 1228 | 1253 | IPR007087 | Zn-finger, C2H2 |
| | | | | | | | | type |
| 128 | AT5G04240 | Pfam | PF00096 | 0.0028 | 1281 | 1305 | IPR007087 | Zn-finger, C2H2 |
| | | | | | | | | type |
| 128 | AT5G04240 | Pfam | PF00096 | 0.0016 | 1311 | 1337 | IPR007087 | Zn-finger, C2H2 |
| | | | | | | | | type |
| 128 | AT5G04240 | Pfam | PF02373 | 1.10E−48 | 292 | 411 | IPR003347 | Transcription |
| | | | | | | | | factor jumonji, |
| | | | | | | | | jmjC |
| 128 | AT5G04240 | Pfam | PF02375 | 1.00E−09 | 15 | 58 | IPR003349 | Transcription |
| | | | | | | | | factor jumonji, |
| | | | | | | | | JmjN |
| 130 | AT5G06550 | Pfam | PF00646 | 0.0013 | 81 | 128 | IPR001810 | Cyclin-like F- |
| | | | | | | | | box |
| 130 | AT5G06550 | Pfam | PF02373 | 3.20E−07 | 311 | 422 | IPR003347 | Transcription |
| | | | | | | | | factor jumonji, |
| | | | | | | | | jmjC |
| 130 | AT5G46910 | Pfam | PF02373 | 1.00E−49 | 199 | 322 | IPR003347 | Transcription |
| | | | | | | | | factor jumonji, |
| | | | | | | | | jmjC |
| 132 | AT5G46910 | Pfam | PF02375 | 2.90E−09 | 21 | 62 | IPR003349 | Transcription |
| | | | | | | | | factor jumonji, |
| | | | | | | | | JmjN |
| 134 | AT5G63080 | Pfam | PF02373 | 3.90E−16 | 164 | 270 | IPR003347 | Transcription |
| | | | | | | | | factor jumonji, |
| | | | | | | | | jmjC |
| 74 | AT3G20810 | Pfam | PF02373 | 0.00013 | 378 | 409 | IPR003347 | Transcription |
| | | | | | | | | factor jumonji, |
| | | | | | | | | jmjC |
| 84 | AT5G19840 | Pfam | PF02373 | 0.036 | 173 | 281 | IPR003347 | Transcription |
| | | | | | | | | factor jumonji, |
| | | | | | | | | jmjC |
| 86 | AT5G19840 | Pfam | PF04967 | 0.47 | 295 | 307 | IPR007050 | HTH DNA |
| | | | | | | | | binding domain |
| 170 | Gm_JMJ_1 | Pfam | PF02373.11 | 9.70E−06 | 297 | 404 | IPR003347 | JmjC domain |

### Example 16

### Cloning of the JMJC Nucleic Acid Sequence Used in the Methods of the Invention

[1141] The nucleic acid sequence used in the methods of the invention was amplified by PCR using as template a custom-made Arabidopsis thaliana seedlings cDNA library (in pGMV Sport 6.0; Invitrogen, Paisley, UK). PCR was performed using Hifi Taq DNA polymerase in standard conditions, using 200 ng of template in a 50 μl PCR mix. An upstream and downstream primer as represented by SEQ ID NO: 75 and SEQ ID NO: 76 respectively were used to amplify by PCR (Polymerase Chain Reaction) the coding region of JMJC as represented by SEQ ID NO: 73. The primers include the AttB sites for Gateway recombination to facilitate the cloning of the amplified PCR DNA fragment into a Gateway cloning vector.

[1142] The amplified PCR fragment was purified also using standard methods. The first step of the Gateway procedure, the BP reaction, was then performed, during which the PCR fragment recombines in vivo with the pDONR201 plasmid to produce, according to the Gateway terminology, an “entry clone”, pJMJC. Plasmid pDONR201 was purchased from Invitrogen, as part of the Gateway® technology.

[1143] The entry clone comprising SEQ ID NO: 73 was then used in an LR reaction with a destination vector used for Oryza sativa transformation. This vector contained as functional elements within the T-DNA borders: a plant selectable marker; a screenable marker expression cassette; and a Gateway cassette intended for LR in vivo recombination with the nucleic acid sequence of interest already cloned in the entry clone. A rice GOS2 promoter (SEQ ID NO: 77) for constitutive expression was located upstream of this Gateway cassette.

[1144] After the LR recombination step, the resulting expression vector pGOS2::JMJC (FIG. 9) was transformed into Agrobacterium strain LBA4044 according to methods well known in the art.

### Example 17

### Plant Transformation

[1145] Transformation of plants was carried out according to the procedure outlined in Example 7

### Example 18

### Phenotypic Evaluation Procedure

### 18.1 Evaluation Setup

[1146] Approximately 35 independent T0 rice transformants were generated. The primary transformants were transferred from a tissue culture chamber to a greenhouse for growing and harvest of T1 seed. Eight events: of which the T1 progeny segregated 3:1 for presence/absence of the transgene, were retained. For each of these events, approximately 10 T1 seedlings containing the transgene (hetero- and homo-zygotes) and approximately 10 T1 seedlings lacking the transgene (nullizygotes) were selected by monitoring visual marker expression. The transgenic plants and the corresponding nullizygotes were grown side-by-side at random positions. Greenhouse conditions were of shorts days (12 hours light), 28° C. in the light and 22° C. in the dark, and a relative humidity of 70%. Plants grown under non-stress conditions are supplied with water at regular intervals to ensure that water and nutrients are not limiting to satisfy plant needs to complete growth and development.

[1147] Four T1 events were further evaluated in the T2 generation following the same evaluation procedure as for the T1 generation but with more individuals per event. From the stage of sowing until the stage of maturity the plants were passed several times through a digital imaging cabinet. At each time point digital images (2048×1536 pixels, 16 million colours) were taken of each plant from at least 6 different angles.

### Drought Screen

[1148] Plants from T2 seeds were grown in potting soil under normal conditions until they approached the heading stage. They were then transferred to a “dry” section where irrigation was withheld. Humidity probes were inserted in randomly chosen pots to monitor the soil water content (SWC). When SWC went below certain thresholds, the plants were automatically re-watered continuously until a normal level was reached again. The plants were then re-transferred again to normal conditions. The rest of the cultivation (plant maturation, seed harvest) was the same as for plants not grown under abiotic stress conditions. Growth and yield parameters are recorded as detailed for growth under normal conditions.

### Nitrogen Use Efficiency Screen

[1149] Rice plants from T2 seeds are grown in potting soil under normal conditions except for the nutrient solution. The pots are watered from transplantation to maturation with a specific nutrient solution containing reduced N nitrogen (N) content, usually between 7 to 8 times less. The rest of the cultivation (plant maturation, seed harvest) is the same as for plants not grown under abiotic stress. Growth and yield parameters are recorded as detailed for growth under normal conditions.

### 18.2 Statistical Analysis: F Test

[1150] A two factor ANOVA (analysis of variants) was used as a statistical model for the overall evaluation of plant phenotypic characteristics. An F test was carried out on all the parameters measured of all the plants of all the events transformed with the gene of the present invention. The F test was carried out to check for an effect of the gene over all the transformation events and to verify for an overall effect of the gene, also known as a global gene effect. The threshold for significance for a true global gene effect was set at a 5% probability level for the F test. A significant F test value points to a gene effect, meaning that it is not only the mere presence or position of the gene that is causing the differences in phenotype.

[1151] Because two experiments with overlapping events were carried out, a combined analysis was performed. This is useful to check consistency of the effects over the two experiments, and if this is the case, to accumulate evidence from both experiments in order to increase confidence in the conclusion. The method used was a mixed-model approach that takes into account the multilevel structure of the data (i.e. experiment—event—segregants). P values were obtained by comparing likelihood ratio test to chi square distributions.

### 18.3 Parameters Measured

### Biomass-Related Parameter Measurement

[1152] From the stage of sowing until the stage of maturity the plants were passed several times through a digital imaging cabinet. At each time digital images (2048×1536 pixels, 16 million colours) were taken of each plant from at least 6 different angles.

[1153] The plant aboveground area (or leafy biomass) was determined by counting the total number of pixels on the digital images from aboveground plant parts discriminated from the background. This value was averaged for the pictures taken on the same time point from the different angles and was converted to a physical surface value expressed in square mm by calibration. Experiments show that the aboveground plant area measured this way correlates with the biomass of plant parts above ground. The above ground area is the area measured at the time point at which the plant had reached its maximal leafy biomass. The early vigour is the plant (seedling) aboveground area three weeks post-germination. Increase in root biomass is expressed as an increase in total root biomass (measured as maximum biomass of roots observed during the lifespan of a plant); or as an increase in the root/shoot index (measured as the ratio between root mass and shoot mass in the period of active growth of root and shoot).

[1154] Early vigour was determined by counting the total number of pixels from aboveground plant parts discriminated from the background. This value was averaged for the pictures taken on the same time from different angles and was converted to a physical surface value expressed in square mm by calibration. The results described below are for plants three weeks post-germination.

### Seed-Related Parameter Measurements

[1155] The mature primary panicles were harvested, counted, bagged, barcode-labelled and then dried for three days in an oven at 37° C. The panicles were then threshed and all the seeds were collected and counted. The filled husks were separated from the empty ones using an air-blowing device. The empty husks were discarded and the remaining fraction was counted again. The filled husks were weighed on an analytical balance. The number of filled seeds was determined by counting the number of filled husks that remained after the separation step. The total seed yield was measured by weighing all filled husks harvested from a plant. Total seed number per plant was measured by counting the number of husks harvested from a plant. Thousand Kernel Weight (TKW) is extrapolated from the number of filled seeds counted and their total weight. The Harvest Index (HI) in the present invention is defined as the ratio between the total seed yield and the above ground area (mm²), multiplied by a factor 10⁸. The total number of flowers per panicle as defined in the present invention is the ratio between the total number of seeds and the number of mature primary panicles. The seed fill rate as defined in the present invention is the proportion (expressed as a %) of the number of filled seeds over the total number of seeds (or florets).

### Example 19

### Results of the Phenotypic Evaluation of the Transgenic Plants

[1156] The results of the evaluation of transgenic rice plants expressing the JMJC nucleic acid as represented by SEQ ID NO: 73 under non-stress conditions are presented below. An increase of at least 5% was observed for emergence vigour (early vigour), root/shoot index, total seed yield, harvest index, and of at least 3% for thousand kernel weight in the transgenic plants of when compared to the control nullizygote plants.

[1157] The results of the evaluation of transgenic rice plants expressing SEQ ID NO: 73 under drought-stress conditions are presented hereunder. An increase of at least 5% was observed for root/shoot index, total seed weight, number of filled seeds, fill rate, harvest index and of at least 3% for thousand kernel weight in the transgenic plants of when compared to the control nullizygote plants.

### III. Casein Kinase I

### Example 20

### Identification of Sequences Related to the CKI Nucleic Acid Sequence Used in the Methods of the Invention

[1158] Sequences (full length cDNA, ESTs or genomic) related to the nucleic acid sequence used in the methods of the present invention are identified amongst those maintained in the Entrez Nucleotides database at the National Center for Biotechnology Information (NCBI) using database sequence search tools, such as the Basic Local Alignment Tool (BLAST) (Altschul et al. (1990) J. Mol. Biol. 215:403-410; and Altschul et al. (1997) Nucleic Acids Res. 25:3389-3402). The program is used to find regions of local similarity between sequences by comparing nucleic acid or polypeptide sequences to sequence databases and by calculating the statistical significance of matches. For example, the polypeptide encoded by the nucleic acids used in the present invention are used for the TBLASTN algorithm, with default settings and the filter to ignore low complexity sequences set off. The output of the analysis is viewed by pairwise comparison, and ranked according to the probability score (E-value), where the score reflects the probability that a particular alignment occurs by chance (the lower the E-value, the more significant the hit). In addition to E-values, comparisons are also scored by percentage identity. Percentage identity refers to the number of identical nucleotides (or amino acids) between the two compared nucleic acid (or polypeptide) sequences over a particular length. In some instances, the default parameters may be adjusted to modify the stringency of the search. For example the E-value may be increased to show less stringent matches. This way, short nearly exact matches may be identified.

[1159] In some instances, related sequences may tentatively be assembled and publicly disclosed by research institutions, such as The Institute for Genomic Research (TIGR). The Eukaryotic Gene Orthologs (EGO) database may be used to identify such related sequences, either by keyword search or by using the BLAST algorithm with the nucleic acid or polypeptide sequence of interest.

### Example 21

### Alignment of GRP Polypeptide Sequences

[1160] Alignment of polypeptide sequences is performed using the AlignX programme from the Vector NTI package (Invitrogen) which is based on the popular Clustal W algorithm of progressive alignment (Thompson et al. (1997) Nucleic Acids Res 25:4876-4882; Chema at al. (2003). Nucleic Acids Res 31:3497-3500). Default values are for the gap open penalty of 10, for the gap extension penalty of 0,1 and the selected weight matrix is Blosum 62 (if polypeptides are aligned). Minor manual editing may be done to further optimise the alignment.

[1161] A phylogenetic tree of GRP polypeptides is constructed using a neighbour-joining clustering algorithm as provided in the AlignX programme from Vector NTI (Invitrogen).

### Example 22

### Calculation of Global Percentage Identity Between Polypeptide Sequences Useful in Performing the Methods of the Invention

[1162] Global percentages of similarity and identity between full length polypeptide sequences useful in performing the methods of the invention are determined using one of the methods available in the art, the MatGAT (Matrix Global Alignment Tool) software (BMC Bioinformatics. 2003 4:29. MatGAT: an application that generates similarity/identity matrices using protein or DNA sequences. Campanella J J, Bitincka L, Smalley J; software hosted by Ledion Bitincka). MatGAT software generates similarity/identity matrices for DNA or protein sequences without needing pre-alignment of the data. The program performs a series of pair-wise alignments using the Myers and Miller global alignment algorithm (with a gap opening penalty of 12, and a gap extension penalty of 2), calculates similarity and identity using for example Blosum 62 (for polypeptides), and then places the results in a distance matrix. Sequence similarity is shown in the bottom half of the dividing line and sequence identity is shown in the top half of the diagonal dividing line.

[1163] Parameters used in the comparison were:
[1164] Scoring matrix: Blosum62
[1165] First Gap: 12
[1166] Extending gap: 2

[1167] A MATGAT table for local alignment of a specific domain, or data on % identity/similarity between specific domains may also be generated.

### Example 23

### Identification of Domains Comprised in Polypeptide Sequences Useful in Performing the Methods of the Invention

[1168] The Integrated Resource of Protein Families, Domains and Sites (InterPro) database is an integrated interface for the commonly used signature databases for text- and sequence-based searches. The InterPro database combines these databases, which use different methodologies and varying degrees of biological information about well-characterized proteins to derive protein signatures. Collaborating databases include SWISS-PROT, PROSITE, TrEMBL, PRINTS, Propom and Pfam, Smart and TIGRFAMs. Pfam is a large collection of multiple sequence alignments and hidden Markov models covering many common protein domains and families. Pfam is hosted at the Sanger Institute server in the United Kingdom. Interpro is hosted at the European Bioinformatics Institute in the United Kingdom.

[1169] The protein sequences representing the GRP are used as query to search the InterPro database.

### Example 24

### Topology Prediction of the Polypeptide Sequences Useful in Performing the Methods of the Invention

[1170] TargetP 1.1 predicts the subcellular location of eukaryotic proteins. The location assignment is based on the predicted presence of any of the N-terminal pre-sequences: chloroplast transit peptide (cTP), mitochondrial targeting peptide (mTP) or secretory pathway signal peptide (SP). Scores on which the final prediction is based are not really probabilities, and they do not necessarily add to one. However, the location with the highest score is the most likely according to TargetP, and the relationship between the scores (the reliability class) may be an indication of how certain the prediction is. The reliability class (RC) ranges from 1 to 5, where 1 indicates the strongest prediction. TargetP is maintained at the server of the Technical University of Denmark.

[1171] For the sequences predicted to contain an N-terminal presequence a potential cleavage site can also be predicted.

[1172] A number of parameters were selected, such as organism group (non-plant or plant), cutoff sets (none, predefined set of cutoffs, or user-specified set of cutoffs), and the calculation of prediction of cleavage sites (yes or no).

[1173] The protein sequences representing the GRP are used to query TargetP 1.1. The “plant” organism group is selected, no cutoffs defined, and the predicted length of the transit peptide requested.

[1174] Many other algorithms can be used to perform such analyses, including:
[1175] ChloroP 1.1 hosted on the server of the Technical University of Denmark;
[1176] Protein Prowler Subcellular Localisation Predictor version 1.2 hosted on the server of the Institute for Molecular Bioscience, University of Queensland, Brisbane, Australia;
[1177] PENCE Proteome Analyst PA-GOSUB 2.5 hosted on the server of the University of Alberta, Edmonton, Alberta, Canada;
[1178] TMHMM, hosted on the server of the Technical University of Denmark

### Example 25

### Cloning of the Nucleic Acid Sequence Used in the Methods of the Invention

### Cloning of SEQ ID NO: 171:

[1179] The nucleic acid sequence SEQ ID NO: 171 used in the methods of the invention was amplified by PCR using as template a custom-made Arabidopsis thaliana seedlings cDNA library (in pCMV Sport 6.0; Invitrogen, Paisley, UK). PCR was performed using Hifi Taq DNA polymerase in standard conditions, using 200 ng of template in a 50 μl PCR mix. The primers used were prm8667 (SEQ ID NO: 177; sense, start codon in bold):

5′-ggggacaagtttgtacaaaaaagcaggcttaaacaatggactgc
aacatggtatct-3′

and prm8668 (SEQ ID NO: 178; reverse, complementary):

5′-ggggaccactttgtacaagaaagctgggtcacattacttactcatc
tattttgg-3′,

which include the AttB sites for Gateway recombination. The amplified PCR fragment was purified also using standard methods. The first step of the Gateway procedure, the BP reaction, was then performed, during which the PCR fragment recombines in vivo with the pDONR201 plasmid to produce, according to the Gateway terminology, an “entry clone”. Plasmid pDONR201 was purchased from Invitrogen, as part of the Gateway® technology.

### Cloning of SEQ ID NO: 173:

[1180] A cDNA-AFLP experiment was performed on a synchronized tobacco BY2 cell culture (Nicotiana tabacum L. cv. Bright Yellow-2), and BY2 expressed sequence tags that were cell cycle modulated were elected for further cloning. The expressed sequence tags were used to screen a tobacco cDNA library and to isolate the full-length cDNA of interest, namely one coding for SEQ ID NO: 173.

[1181] A tobacco BY2 (Nicotiana tabacum L. cv. Bright Yellow-2) cultured cell suspension was synchronized by blocking cells in early S-phase with aphidicolin as follows. The cell suspension of Nicotiana tabacum L. cv. Bright Yellow 2 was maintained as described (Nagata et al. Int. Rev. Cytol. 132, 1-30, 1992). For synchronization, a 7-day-old stationary culture was diluted 10-fold in fresh medium supplemented with aphidicolin (Sigma-Aldrich, St. Louis, Mo.; 5 mg/l). After 24 h, cells were released from the block by several washings with fresh medium after which their cell cycle progression resumed.

[1182] Total RNA was prepared using LiCl precipitation and poly(A⁺) RNA was extracted from 500 μg of total RNA using Oligotex columns (Qiagen, Hilden, Germany) according to the manufacturer's instructions. Starting from 1 μg of poly(A⁺) RNA, first-strand cDNA was synthesized by reverse transcription with a biotinylated oligo-dT₂₅ primer (Genset, Paris, France) and Superscript II (Life Technologies, Gaithersburg, Md.). Second-strand synthesis was done by strand displacement with Escherichia coli ligase (Life Technologies), DNA polymerase I (USB, Cleveland, Ohio) and RNAse-H (USB).

[1183] Five hundred ng of double-stranded cDNA was used for AFLP analysis as described (Vos et al., Nucleic Acids Res. 23 (21) 4407-4414, 1995; Bachem et al., Plant J. 9 (5) 745-53, 1996) with modifications. The restriction enzymes used were BstYI and MseI (Biolabs) and the digestion was done in two separate steps. After the first restriction digest with one of the enzymes, the 3′ end fragments were trapped on Dyna beads (Dynal, Oslo, Norway) by means of their biotinylated tail, while the other fragments were washed away. After digestion with the second enzyme, the released restriction fragments were collected and used as templates in the subsequent AFLP steps. For pre-amplifications, a MseI primer without selective nucleotides was combined with a BstYI primer containing either a T or a C as 3′ most nucleotide. PCR conditions were as described (Vos et al., 1995). The obtained amplification mixtures were diluted 600-fold and 5 μl was used for selective amplifications using a P³³-labeled BstYI primer and the Amplitaq-Gold polymerase (Roche Diagnostics, Brussels, Belgium). Amplification products were separated on 5% polyacrylamide gels using the Sequigel system (Biorad). Dried gels were exposed to Kodak Biomax films as well as scanned in a PhosphorImager (Amersham Pharmacia Biotech, Little Chalfont, UK).

[1184] Bands corresponding to differentially expressed transcripts, among which the (partial) transcript corresponding to SEQ ID NO: 173, were isolated from the gel and eluted DNA was re-amplified under the same conditions as for selective amplification. Sequence information was obtained either by direct sequencing of the re-amplified polymerase chain reaction product with the selective BstYI primer or after cloning the fragments in pGEM-T easy (Promega, Madison, Wis.) and sequencing of individual clones. The obtained sequences were compared against nucleotide and protein sequences present in the publicly available databases by BLAST sequence alignments (Altschul et al., Nucleic Acids Res. 25 (17) 3389-3402 1997). When available, tag sequences were replaced with longer EST or isolated cDNA sequences to increase the chance of finding significant homology. The physical cDNA clone corresponding to SEQ ID NO 173 was subsequently amplified from a commercial tobacco cDNA library as follows:

[1185] A c-DNA library with an average size of inserts of 1,400 by was prepared from poly(A⁺) RNA isolated from actively dividing, non-synchronized BY2 tobacco cells. These library-inserts were cloned in the vector pCMVSPORT6.0, comprising an attB Gateway cassette (Life Technologies). From this library, 46,000 clones were selected, arrayed in 384-well microtiter plates, and subsequently spotted in duplicate on nylon filters. The arrayed clones were screened using pools of several hundreds of radioactively labelled tags as probes (including the BY2-tag corresponding to the sequence SEQ ID NO: 173). Positive clones were isolated (among which the clone corresponding to SEQ ID NO: 173), sequenced, and aligned with the tag sequence. Where the hybridisation with the tag failed, the full-length cDNA corresponding to the tag was selected by PCR amplification: tag-specific primers were designed using software commonly available and used in combination with a common vector primer to amplify partial cDNA inserts. Pools of DNA from 50,000, 100,000, 150,000, and 300,000 cDNA clones were used as templates in the PCR amplifications. Amplification products were then isolated from agarose gels, cloned, sequenced and their sequence aligned with those of the tags. Next, the full-length cDNA corresponding to the nucleotide sequence of SEQ ID NO 173 was cloned from the pCMVsport6.0 library vector into pDONR201, a Gateway® donor vector (Invitrogen, Paisley, UK) via a LR reaction, resulting in an entry clone.

[1186] The entry clone comprising SEQ ID NO: 171 or SEQ ID NO: 173 was then used in an LR reaction with a destination vector used for Oryza sativa transformation. This vector contained as functional elements within the T-DNA borders: a plant selectable marker; a screenable marker expression cassette; and a Gateway cassette intended for LR in vivo recombination with the nucleic acid sequence of interest already cloned in the entry clone. A rice WSI18 promoter (SEQ ID NO: 175) for seed specific expression was located upstream of this Gateway cassette.

[1187] After the LR recombination step, the resulting expression vector pWSI18::GRP (FIG. 11) was transformed into Agrobacterium strain LBA4044 according to methods well known in the art.

[1188] In an alternative construct the rice GOS2 promoter (SEQ ID NO: 176) was used, resulting in the expression vector pGOS2::GRP.

### Example 26

### Plant Transformation

[1189] Transformation of plants was carried out according to the procedure outlined in Example 7.

### Example 27

### Phenotypic Evaluation Procedure

### 27.1 Evaluation Setup

[1190] Approximately 35 independent T0 rice transformants were generated. The primary transformants were transferred from a tissue culture chamber to a greenhouse for growing and harvest of T1 seed. Six events, of which the T1 progeny segregated 3:1 for presence/absence of the transgene, were retained. For each of these events, approximately 10 T1 seedlings containing the transgene (hetero- and homo-zygotes) and approximately 10 T1 seedlings lacking the transgene (nullizygotes) were selected by monitoring visual marker expression. The transgenic plants and the corresponding nullizygotes were grown side-by-side at random positions. Greenhouse conditions were of shorts days (12 hours light), 28° C. in the light and 22° C. in the dark, and a relative humidity of 70%. Plants grown under non-stress conditions are supplied with water at regular intervals to ensure that water and nutrients are not limiting to satisfy plant needs to complete growth and development.

[1191] Four T1 events were further evaluated in the T2 generation following the same evaluation procedure as for the T1 generation but with more individuals per event. From the stage of sowing until the stage of maturity the plants were passed several times through a digital imaging cabinet. At each time point digital images (2048×1536 pixels, 16 million colours) were taken of each plant from at least 6 different angles.

### Drought Screen

[1192] Plants from T2 seeds were in potting soil under normal conditions until they approached the heading stage. They were then transferred to a “dry” section where irrigation was withheld. Humidity probes were inserted in randomly chosen pots to monitor the soil water content (SWC). When SWC went below certain thresholds, the plants were automatically re-watered continuously until a normal level was reached again. The plants were then re-transferred again to normal conditions. The rest of the cultivation (plant maturation, seed harvest) was the same as for plants not grown under abiotic stress conditions. Growth and yield parameters are recorded as detailed for growth under normal conditions.

### Nitrogen Use Efficiency Screen

[1193] Rice plants from T2 seeds are grown in potting soil under normal conditions except for the nutrient solution. The pots are watered from transplantation to maturation with a specific nutrient solution containing reduced N nitrogen (N) content, usually between 7 to 8 times less. The rest of the cultivation (plant maturation, seed harvest) is the same as for plants not grown under abiotic stress. Growth and yield parameters are recorded as detailed for growth under normal conditions.

### 27.2 Statistical Analysis: F Test

[1194] A two factor ANOVA (analysis of variants) was used as a statistical model for the overall evaluation of plant phenotypic characteristics. An F test was carried out an all the parameters measured of all the plants of all the events transformed with the gene of the present invention. The F test was carried out to check for an effect of the gene over all the transformation events and to verify for an overall effect of the gene, also known as a global gene effect. The threshold for significance for a true global gene effect was set at a 5% probability level for the F test. A significant F test value points to a gene effect, meaning that it is not only the mere presence or position of the gene that is causing the differences in phenotype.

[1195] Because two experiments with overlapping events were carried out, a combined analysis was performed. This is useful to check consistency of the effects over the two experiments, and if this is the case, to accumulate evidence from both experiments in order to increase confidence in the conclusion. The method used was a mixed-model approach that takes into account the multilevel structure of the data (i.e. experiment—event—segregants). P values were obtained by comparing likelihood ratio test to chi square distributions.

### 27.3 Parameters Measured

### Biomass-Related Parameter Measurement

[1196] From the stage of sowing until the stage of maturity the plants were passed several times through a digital imaging cabinet. At each time point digital images (2048×1536 pixels, 16 million colours) were taken of each plant from at least 6 different angles.

[1197] The plant aboveground area (or leafy biomass) was determined by counting the total number of pixels on the digital images from aboveground plant parts discriminated from the background. This value was averaged for the pictures taken on the same time point from the different angles and was converted to a physical surface value expressed in square mm by calibration. Experiments show that the aboveground plant area measured this way correlates with the biomass of plant parts above ground. The above ground area is the area measured at the time point at which the plant had reached its maximal leafy biomass.

[1198] The early vigour is the plant (seedling) aboveground area three weeks post-germination. Early vigour was determined by counting the total number of pixels from aboveground plant parts discriminated from the background. This value was averaged for the pictures taken on the same time point from different angles and was converted to a physical surface value expressed in square mm by calibration. The results described below are for plants three weeks post-germination.

### Seed-Related Parameter Measurements

[1199] The mature primary panicles were harvested, counted, bagged, barcode-labelled and then dried for three days in an oven at 37° C. The panicles were then threshed and all the seeds were collected and counted. The filled husks were separated from the empty ones using an air-blowing device. The empty husks were discarded and the remaining fraction was counted again. The filled husks were weighed on an analytical balance. The number of filled seeds was determined by counting the number of filled husks that remained after the separation step. The total seed yield was measured by weighing all filled husks harvested from a plant. Total seed number per plant was measured by counting the number of husks harvested from a plant. Thousand Kernel Weight (TKW) is extrapolated from the number of filled seeds counted and their total weight. The Harvest Index (HI) in the present invention is defined as the ratio between the total seed yield and the above ground area (mm²), multiplied by a factor 10⁶. The total number of flowers per panicle as defined in the present invention is the ratio between the total number of seeds and the number of mature primary panicles. The seed fill rate as defined in the present invention is the proportion (expressed as a %) of the number of filled seeds over the total number of seeds (or florets).

### Example 28

### Results of the Phenotypic Evaluation of the Transgenic Plants

[1200] The transgenic rice plants expressing the GRP nucleic acid represented by SEQ ID NO: 171 under control of the WSI18 promoter showed an increase of more than 5% for biomass, total weight of seeds, number of filled seeds, fill rate, and harvest index, when grown under conditions of drought stress. When grown under non-stress conditions, there was an increase of more than 5% observed for biomass, number of filled seeds, total weight of seeds, and number of first panicles.

[1201] For the construct with SEQ ID NO: 171 under control of the GOS2 promoter, an increase was observed in the transgenic plants for early vigour and for flowers per panicle, and for each these parameters, the increase was more than 5%.

[1202] Transgenic plants expressing SEQ ID NO: 173 under control of the WSI18 promoter and grown under conditions of drought stress, showed an increase in total weight of seeds, number of filled seeds, number of flowers per panicle, harvest index, and Thousand Kernel Weight. For Thousand Kernel Weight the observed increase was at least 3.5% and for the other parameters the increase was more than 5%.

### IV. Plant Homeodomain Finger-Homeodomain (PHDf-HD) Polypeptide

### Example 29

### Identification of Sequences Related to the Nucleic Acid Sequence Used in the Methods of the Invention

[1203] Sequences (full length cDNA, ESTs or genomic) related to the nucleic acid sequence used in the methods of the present invention were identified amongst those maintained in the Entrez Nucleotides database at the National Center for Biotechnology Information (NCBI) using database sequence search tools, such as the Basic Local Alignment Tool (BLAST) (Altschul et al. (1990) J. Mol. Biol. 215:403-410; and Altschul et al. (1997) Nucleic Acids Res. 25:3389-3402). The program is used to find regions of local similarity between sequences by comparing nucleic acid sequence or polypeptide sequences to sequence databases and by calculating the statistical significance of matches. For example, the polypeptide encoded by the nucleic acid sequence of the present invention was used for the TBLASTN algorithm, with default settings and the filter to ignore low complexity sequences set off. The output of the analysis was viewed by pairwise comparison, and ranked according to the probability score (E-value), where the score reflect the probability that a particular alignment occurs by chance (the lower the E-value, the more significant the hit). In addition to E-values, comparisons were also scored by percentage identity. Percentage identity refers to the number of identical nucleotides (or amino acids) between the two compared nucleic acid sequence (or polypeptide) sequences over a particular length. In some instances, the default parameters may be adjusted to modify the stringency of the search. For example the E-value may be increased to show less stringent matches. This way, short nearly exact matches may be identified.

[1204] Table D1 provides a list of nucleic acid sequences related to the PHDf-HDnucleic acid sequence used in the methods of the present invention.

TABLE D1
Examples of PHDf-HD polypeptides:

| | | Nucleic acid | Polypeptide | Database | |
|---|---|---|---|---|---|
| Name | Source organism | SEQ ID NO: | SEQ ID NO: | accession # | Status |
| Orysa_PHDf_HD | Oryza sativa | 179 | 180 | Os02g05450.1 | FL |
| | | | | NM_001052422 | |
| Arath_PHDf_HD_PRHA | Arabidopsis thaliana | 181 | 182 | At4g029940 | FL |
| | | | | NM_119140 | |
| Eucgr_PHDf_HD | Eucalyptus grandis | 183 | 184 | ADW17964 | FL |
| Medtr_PHDf_HD | Medicago truncatula | 185 | 186 | AC123547 | FL |
| Pinra_PHDf_HD | Pinus radiata | 187 | 188 | ADW18458 | FL |
| Poptr_PHDf_HD | Populus tremuloides | 189 | 190 | scaff_VI.625 | FL |
| Sacof_PHDf_HD | Saccharum officinarum | 191 | 192 | CA157855.1, | FL |
| | | | | CA261734.1, | |
| | | | | CA253314.1, | |
| | | | | CA220753.1, | |
| | | | | CA201958.1 | |
| Vitvi_PHDf_HD | Vitis vinifera | 193 | 184 | AM477372.2, | FL |
| | | | | AM488059.1 | |
| Zeama_PHDf_HD | Zea mays | 185 | 186 | EE162310, | FL |
| | | | | DN204182, | |
| | | | | CF057937 | |
| Arath_PHDf_HD_HAT3.1 | Arabidopsis thaliana | 187 | 188 | AT3G19510 | FL |
| | | | | NM_112838 | |
| Lotja_PHDf_HD | Lotus japonicus | 189 | 190 | AP006117.1 | FL |
| Orysa_PHDf_HD_HAZ1 | Oryza sativa | 191 | 192 | AB081340 | FL |
| | | | | Os06g12400.1 | |
| Petcr_PHDf_HD_PRHP | Petroselinum crispum | 193 | 194 | L21975 | FL |
| Zeama_PHDf_HD_HOX1a | Zea mays | 195 | 196 | X67561 | FL |
| Zeama_PHDf_HD_HOX1b | Zea mays | 197 | 198 | X92428 | FL |
| Zeama_PHDf_HD_HOX2a | Zea mays | 199 | 200 | X89760.1 | FL |
| Zeama_PHDf_HD_HOX2b | Zea mays | 201 | 202 | X89761 | FL |
| Vitvi_PHDf_HD_II | Vitis vinifera | 203 | 204 | AM464161.2 | FL |
| | | | | AM478203.2 | |
| Poptr_PHDf_HD_II | Populus tremuloides | 205 | 206 | scaff_IX.730 | FL |
| Poptr_PHDf_HD_III | Populus tremuloides | 207 | 208 | LG_I002624 | FL |
| Poptr_PHDf_HD_IV | Populus tremuloides | 209 | 210 | LG_XVIII1192 | FL |
| Ostta_PHDf_HD | Ostreococcus tauri | 211 | 212 | CR954214.4 | FL |
| Aqufor_PHDf_HD partial | Aquilegia formosa x | 213 | 214 | DR914726.1, | Partial |
| | Aquilegia pubescens | | | DR941696.1, | |
| | | | | DR943570.1 | |
| Glyma_PHDf_HD | Glycine max | 215 | 216 | Contig | Partial |
| | | | | GM06LC25006 | |
| Lotco_PHDf_HD | Lotus corniculatus | 217 | 218 | AP004517 | Partial |
| Sorpr_PHDf_HD 3′ | Sorghum propinquum | 219 | 220 | BF656332 | Partial |
| Sorpr_PHDf_HD 5′ | Sorghum propinquum | 221 | 222 | BF704605 | Partial |
| Phypa_PHDf_HD | Physcomitrella patens | 238 | 239 | XM_001762483 | FL |
| Phypa_PHDf_HD | Physcomitrella patens | 240 | 241 | XM_001779822 | FL |
| Zeama_PHDf_HD | Zea mays | 242 | 243 | | FL |

### Example 30

### Alignment of PHDf-HD Polypeptide Sequences

[1205] The University of Potsdam, Germany, has created plant transcription factor databases, including for Orysa sativa named riceTFOB. The polypeptide sequences corresponding to the transcription factors belonging to the HD family (120 gene models (91 loci) identified so far) were all downloaded, including the two PHDf-HD polypeptides (Os02g05450.1 and Os06g12400.1) identified to date. The polypeptide sequences of Table D1 of the present application were added (when full length, i.e. 21 polypeptide sequences) to the set of the HD family.

[1206] Alignment of all the polypeptide sequences was performed the Clustal algorithm (1.83) of progressive alignment, using default values (Thompson et al. (1997) Nucleic Acids Res 25:4876-4882; Chema et al. (2003). Nucleic Acids Res 31:3497-3500). A neighbour-joining tree was constructed thereafter, and is represented in FIG. 13 of the present application. The group of interest, comprising the two rice paralogs (Os02g05450.1 and Os06g12400.1) has been circled. Any polypeptide falling within this HD group (after a new multiple alignment step as described hereinabove) is considered to be useful in performing the methods of the invention as described herein.

[1207] In a multiple sequence alignment of the full length PHDf-HD polypeptides of Table D1, a number of features can be identified, and are marked in FIG. 17. From the N-terminus to the C-terminus of the polypeptides are: (i) a predicted nuclear localisation signal (NLS); (ii) a leucine zipper (ZIP), with four heptads (boxed in which usually a leucine (occasionally an isoleucine, a valine, or a methionine)) appears every seventh amino acid; (iii) a PHD finger (PHDf), with the typical C4HC3 (four cysteines, one histidine, three cysteines) with a characteristics cysteine spacing; (iv) an acidic stretch (rich in acidic amino acids D and E); (v) basic stretches (rich in basic amino acids K and R); (vi) a homeodomain (HD).

### Example 31

### Calculation of Global Percentage Identity Between Polypeptide Sequences Useful in Performing the Methods of the Invention

[1208] Global percentages of similarity and identity between full length polypeptide sequences useful in performing the methods of the invention were determined using one of the methods available in the art, the MatGAT (Matrix Global Alignment Tool) software (BMC Bioinformatics. 2003 4:29. MatGAT: an application that generates similarity/identity matrices using protein or DNA sequences. Campanella J J, Bitincka L, Smalley J; software hosted by Ledion Bitincka). MatGAT software generates similarity/identity matrices for DNA or protein sequences without needing pre-alignment of the data. The program performs a series of pair-wise alignments using the Myers and Miller global alignment algorithm (with a gap opening penalty of 12, and a gap extension penalty of 2), calculates similarity and identity using for example Blosum 62 (for polypeptides), and then places the results in a distance matrix. Sequence similarity is shown in the bottom half of the dividing line and sequence identity is shown in the top half of the diagonal dividing line.

[1209] Parameters used in the comparison were:
[1210] Scoring matrix: Blosum62
[1211] First Gap: 12
[1212] Extending gap: 2

[1213] Results of the software analysis are shown in Table D2 for the global similarity and identity over the full length of the polypeptide sequences (excluding the partial polypeptide sequences). Percentage identity is given above the diagonal and percentage similarity is given below the diagonal.

[1214] The percentage identity between the PHDf-HD polypeptide sequences useful in performing the methods of the invention can be as low as 15% amino acid identity compared to SEQ ID NO: 180.

TABLE D2
MatGAT results for global similarity and identity over the full length of the
polypeptide sequences.

| | 1 | 2 | 3 | 4 | 5 | 6 | 7 | 8 | 9 | 10 | 11 | 12 | 13 | 14 | 15 | 16 | 17 | 18 | 19 | 20 | 21 |
|---|---|---|---|---|---|---|---|---|---|---|---|---|---|---|---|---|---|---|---|---|---|
| 1. Arath_PHDf_HD_PRHA | | 25 | 31 | 40 | 19 | 38 | 26 | 17 | 32 | 40 | 20 | 19 | 40 | 30 | 40 | 23 | 31 | 25 | 25 | 18 | 19 |
| 2. Arath_PHDf-HD_HAT3 | 44 | | 23 | 27 | 33 | 26 | 34 | 28 | 27 | 26 | 34 | 35 | 27 | 23 | 28 | 34 | 24 | 36 | 35 | 18 | 20 |
| 3. Orysa_PHDf_HD | 46 | 39 | | 35 | 18 | 34 | 20 | 18 | 31 | 34 | 17 | 18 | 33 | 56 | 36 | 21 | 57 | 21 | 23 | 15 | 15 |
| 4. Eucgr_PHDf_HD | 57 | 45 | 51 | | 21 | 47 | 27 | 20 | 36 | 50 | 22 | 21 | 51 | 32 | 52 | 25 | 32 | 26 | 27 | 17 | 17 |
| 5. Lotja_PHDf-HD | 36 | 47 | 31 | 35 | | 22 | 29 | 32 | 23 | 20 | 39 | 40 | 20 | 18 | 21 | 34 | 18 | 31 | 32 | 20 | 22 |
| 6. Medtr_PHDf_HD | 55 | 44 | 51 | 64 | 36 | | 26 | 19 | 35 | 50 | 20 | 20 | 49 | 30 | 50 | 25 | 32 | 27 | 26 | 17 | 17 |
| 7. Orysa_PHDf-HD_HAZ1 | 42 | 50 | 35 | 47 | 45 | 43 | | 26 | 25 | 25 | 29 | 29 | 26 | 21 | 26 | 32 | 21 | 50 | 46 | 29 | 30 |
| 8. Petcr_PHDf_HD_PRHP | 31 | 39 | 28 | 32 | 48 | 31 | 38 | | 22 | 20 | 32 | 33 | 20 | 18 | 20 | 30 | 18 | 26 | 25 | 19 | 21 |
| 9. Pinra_PHDf_HD | 53 | 44 | 47 | 51 | 42 | 50 | 44 | 39 | | 36 | 23 | 23 | 37 | 28 | 39 | 26 | 30 | 25 | 27 | 19 | 19 |
| 10. Poptr_PHDf_HD_I | 58 | 45 | 52 | 67 | 36 | 66 | 45 | 33 | 52 | | 20 | 21 | 84 | 30 | 55 | 25 | 31 | 25 | 25 | 17 | 17 |
| 11. Poptr_PHDf_HD_III | 36 | 47 | 30 | 34 | 56 | 35 | 44 | 46 | 41 | 36 | | 80 | 21 | 19 | 22 | 37 | 18 | 31 | 31 | 20 | 20 |
| 12. Poptr_PHDf_HD_II | 36 | 49 | 31 | 34 | 57 | 34 | 46 | 47 | 42 | 35 | 86 | | 21 | 18 | 22 | 38 | 18 | 30 | 30 | 20 | 21 |
| 13. Poptr_PHDf_HD_IV | 59 | 46 | 51 | 68 | 37 | 67 | 44 | 33 | 54 | 91 | 35 | 35 | | 30 | 57 | 25 | 32 | 25 | 25 | 17 | 17 |
| 14. Sacof_PHDf_HD | 48 | 43 | 69 | 51 | 31 | 50 | 38 | 29 | 45 | 51 | 34 | 33 | 51 | | 34 | 22 | 83 | 21 | 22 | 15 | 16 |
| 15. Vitvi_PHDf_HD_I | 58 | 47 | 52 | 69 | 36 | 67 | 43 | 32 | 52 | 74 | 36 | 35 | 75 | 52 | | 23 | 34 | 27 | 25 | 16 | 17 |
| 16. Vitvi_PHDf_HD_II | 39 | 47 | 36 | 39 | 56 | 39 | 45 | 47 | 43 | 40 | 56 | 57 | 40 | 36 | 41 | | 22 | 32 | 31 | 23 | 24 |
| 17. Zeama_PHDf_HD | 48 | 41 | 70 | 51 | 32 | 52 | 38 | 30 | 45 | 54 | 33 | 32 | 53 | 87 | 53 | 34 | | 22 | 22 | 15 | 15 |
| 18. Zeama_hox1a | 43 | 54 | 39 | 44 | 43 | 44 | 63 | 38 | 43 | 44 | 44 | 43 | 45 | 42 | 43 | 46 | 42 | | 83 | 24 | 24 |
| 19. Zeama_hox1b | 42 | 53 | 40 | 44 | 44 | 42 | 60 | 36 | 43 | 44 | 44 | 43 | 45 | 41 | 44 | 45 | 41 | 88 | | 23 | 23 |
| 20. Zeama_hox2a | 27 | 27 | 24 | 25 | 32 | 25 | 36 | 31 | 31 | 26 | 30 | 31 | 27 | 25 | 26 | 34 | 24 | 31 | 30 | | 81 |
| 21. Zeama_Hox2b | 29 | 28 | 23 | 27 | 33 | 27 | 37 | 34 | 31 | 27 | 32 | 33 | 26 | 25 | 27 | 35 | 25 | 32 | 30 | 86 | |

[1215] The percentage identity can be substantially increased if the identity calculation is performed between the conserved ZIP/PHDf domain (conserved leucine zipper/plant homeodomain finger domain, comprising the Zip and PHDf domains) of SEQ ID NO: 180 (as represented by SEQ ID NO: 233) and the conserved ZIP/PHDf domain of the polypeptides useful in performing the invention. The conserved ZIP/PHDf of SEQ ID NO: 233 is in total 180 contiguous amino acids long. Percentage identity over the conserved ZIP/PHDf domain amongst the polypeptide sequences useful in performing the methods of the invention ranges between 30% and 75% amino acid identity, as shown in Table D3.

TABLE D3
MatGAT results for global similarity and identity over the conserved ZIP/PHDf
domain amongst of the polypeptide sequences.

| | 1 | 2 | 3 | 4 | 5 | 6 | 7 | 8 | 9 | 10 | 11 | 12 | 13 | 14 | 15 | 16 | 17 | 18 | 19 | 20 | 21 |
|---|---|---|---|---|---|---|---|---|---|---|---|---|---|---|---|---|---|---|---|---|---|
| 1. ZIP/PHDf_Arath_PHDf_HD_PRHA | | 52 | 50 | 77 | 48 | 74 | 53 | 48 | 64 | 73 | 48 | 46 | 72 | 51 | 76 | 50 | 52 | 50 | 50 | 53 | 53 |
| 2. ZIP/PHDf_Arath_PHDf-HD_HAT3 | 70 | | 44 | 52 | 73 | 54 | 70 | 69 | 56 | 52 | 75 | 75 | 51 | 43 | 53 | 78 | 46 | 65 | 67 | 64 | 65 |
| 3. ZIP/PHDf_Orysa_PHDf_HD | 69 | 60 | | 56 | 39 | 54 | 37 | 39 | 56 | 53 | 39 | 38 | 53 | 70 | 59 | 41 | 71 | 37 | 38 | 34 | 33 |
| 4. ZIP/PHDf_Eucgr_PHDf_HD | 90 | 70 | 73 | | 52 | 79 | 48 | 50 | 71 | 82 | 51 | 49 | 81 | 55 | 84 | 52 | 56 | 48 | 48 | 49 | 48 |
| 5. ZIP/Lotja_PHDf-HD | 67 | 89 | 59 | 69 | | 52 | 64 | 69 | 52 | 47 | 76 | 76 | 47 | 37 | 50 | 78 | 38 | 64 | 66 | 61 | 61 |
| 6. ZIP/Medtr_PHDf_HD | 86 | 70 | 72 | 87 | 68 | | 52 | 49 | 66 | 74 | 49 | 48 | 75 | 50 | 79 | 51 | 53 | 51 | 51 | 52 | 52 |
| 7. ZIP/PHDf_Orysa_PHDf-HD_HAZ1 | 69 | 83 | 54 | 67 | 83 | 68 | | 64 | 51 | 47 | 68 | 67 | 47 | 35 | 47 | 68 | 37 | 79 | 80 | 82 | 84 |
| 8. ZIP/PHDf_Petcr_PHDf_HD_PRHP | 67 | 80 | 54 | 66 | 83 | 65 | 78 | | 53 | 47 | 71 | 73 | 45 | 39 | 48 | 74 | 42 | 62 | 63 | 62 | 62 |
| 9. ZIP/PHDf_Pinra_PHDf_HD | 82 | 74 | 72 | 83 | 73 | 82 | 70 | 69 | | 66 | 53 | 52 | 67 | 52 | 73 | 55 | 54 | 53 | 52 | 53 | 52 |
| 10. ZIP/PHDf_Poptr_PHDf_HD_I | 87 | 70 | 72 | 92 | 69 | 88 | 67 | 66 | 83 | | 48 | 47 | 93 | 53 | 82 | 50 | 55 | 49 | 48 | 49 | 49 |
| 11. ZIP/PHDf_Poptr_PHDf_HD_III | 66 | 87 | 57 | 67 | 90 | 65 | 82 | 82 | 70 | 67 | | 93 | 48 | 36 | 51 | 82 | 39 | 67 | 70 | 65 | 64 |
| 12. ZIP/PHDf_Poptr_PHDf_HD_II | 65 | 88 | 56 | 66 | 90 | 65 | 81 | 84 | 69 | 66 | 96 | | 46 | 35 | 49 | 83 | 38 | 67 | 69 | 64 | 64 |
| 13. ZIP/PHDf_Poptr_PHDf_HD_IV | 86 | 70 | 72 | 91 | 69 | 88 | 67 | 66 | 82 | 97 | 67 | 66 | | 52 | 82 | 48 | 54 | 47 | 47 | 48 | 47 |
| 14. ZIP/PHDf_Sacof_PHDf_HD | 71 | 60 | 82 | 73 | 57 | 69 | 55 | 57 | 70 | 72 | 56 | 55 | 72 | | 57 | 39 | 92 | 35 | 35 | 33 | 33 |
| 15. ZIP/PHDf_Vitvi_PHDf_HD_I | 89 | 71 | 73 | 90 | 70 | 88 | 67 | 64 | 84 | 91 | 67 | 66 | 89 | 73 | | 51 | 58 | 48 | 48 | 48 | 48 |
| 16. ZIP/PHDf_Vitvi_PHDf_HD_II | 67 | 88 | 58 | 69 | 91 | 68 | 84 | 84 | 73 | 69 | 90 | 93 | 67 | 57 | 69 | | 42 | 65 | 67 | 65 | 64 |
| 17. ZIP/PHDf_Zeama_PHDf_HD | 74 | 61 | 83 | 73 | 58 | 70 | 56 | 58 | 69 | 73 | 57 | 55 | 72 | 96 | 73 | 57 | | 38 | 37 | 35 | 34 |
| 18. ZIP/PHDf_Zeama_hox1a | 71 | 84 | 59 | 71 | 85 | 70 | 88 | 79 | 74 | 72 | 83 | 82 | 71 | 61 | 70 | 85 | 62 | | 94 | 74 | 76 |
| 19. ZIP/PHDf_Zeama_hox1b | 70 | 84 | 58 | 69 | 85 | 68 | 89 | 79 | 74 | 70 | 84 | 83 | 70 | 60 | 70 | 85 | 60 | 98 | | 75 | 78 |
| 20. ZIP/PHDf_Zeama_hox2a | 67 | 80 | 54 | 67 | 83 | 67 | 89 | 76 | 70 | 67 | 80 | 79 | 66 | 54 | 66 | 82 | 56 | 87 | 87 | | 92 |
| 21. ZIP/PHDf_Zeama_Hox2b | 67 | 82 | 53 | 66 | 83 | 67 | 90 | 77 | 71 | 66 | 80 | 79 | 67 | 53 | 67 | 82 | 55 | 88 | 88 | 97 | |

[1216] The percentage identity can also be calculated between the conserved HD of SEQ ID NO: 180 (as represented by SEQ ID NO: 234) and the conserved HD of the polypeptides useful in performing the invention. Percentage identity over the conserved HD amongst the polypeptide sequences useful in performing the methods of the invention ranges between 25% and 70% amino acid identity, as shown in Table D4.

TABLE D4
MatGAT results for global similarity and identity over the conserved HD amongst of
the polypeptide sequences.

| | | 1 | 2 | 3 | 4 | 5 | 6 | 7 | 8 | 9 | 10 | 11 | 12 | 13 | 14 | 15 | 16 | 17 | 18 | 19 | 20 | 21 |
|---|---|---|---|---|---|---|---|---|---|---|---|---|---|---|---|---|---|---|---|---|---|---|
| 1. | HD_Arath_PHDf_HD_PRHA | | 34 | 54 | 72 | 36 | 72 | 38 | 36 | 58 | 68 | 38 | 36 | 70 | 54 | 70 | 34 | 54 | 36 | 33 | 29 | 27 |
| 2. | HD_Arath_PHDf-HD_HAT3 | 56 | | 28 | 32 | 54 | 34 | 40 | 58 | 30 | 32 | 54 | 58 | 32 | 28 | 32 | 58 | 28 | 42 | 39 | 40 | 39 |
| 3. | HD_Orysa_PHDf_HD | 76 | 60 | | 68 | 42 | 58 | 42 | 36 | 46 | 64 | 38 | 40 | 66 | 94 | 62 | 42 | 92 | 38 | 35 | 35 | 33 |
| 4. | HD_Eucgr_PHDf_HD | 86 | 58 | 78 | | 42 | 72 | 44 | 42 | 60 | 82 | 38 | 38 | 84 | 66 | 76 | 42 | 66 | 44 | 41 | 35 | 33 |
| 5. | HD_Lotja_PHDf-HD | 60 | 72 | 66 | 64 | | 38 | 52 | 58 | 36 | 42 | 64 | 68 | 42 | 42 | 40 | 68 | 40 | 56 | 55 | 50 | 46 |
| 6. | HD_Medtr_PHDf_HD | 78 | 60 | 70 | 82 | 66 | | 36 | 36 | 62 | 68 | 38 | 36 | 70 | 58 | 66 | 36 | 58 | 40 | 37 | 27 | 27 |
| 7. | HD_Orysa_PHDf-HD_HAZ1 | 56 | 54 | 64 | 62 | 66 | 58 | | 44 | 26 | 44 | 50 | 48 | 44 | 42 | 40 | 46 | 42 | 70 | 65 | 73 | 71 |
| 8. | HD_Petcr_PHDf_HD_PRHP | 58 | 74 | 58 | 56 | 66 | 58 | 58 | | 36 | 42 | 54 | 58 | 42 | 36 | 38 | 62 | 36 | 50 | 45 | 40 | 39 |
| 9. | HD_Pinra_PHDf_HD | 74 | 54 | 64 | 72 | 58 | 72 | 50 | 52 | | 58 | 30 | 32 | 60 | 44 | 56 | 36 | 44 | 28 | 28 | 21 | 19 |
| 10. | HD_Poptr_PHDf_HD_I | 86 | 56 | 78 | 92 | 64 | 84 | 64 | 56 | 74 | | 36 | 36 | 98 | 64 | 72 | 42 | 64 | 42 | 39 | 35 | 33 |
| 11. | HD_Poptr_PHDf_HD_III | 54 | 72 | 62 | 60 | 82 | 58 | 66 | 66 | 54 | 58 | | 88 | 36 | 38 | 38 | 72 | 38 | 52 | 49 | 46 | 44 |
| 12. | HD_Poptr_PHDf_HD_II | 56 | 72 | 64 | 62 | 82 | 60 | 68 | 66 | 56 | 60 | 100 | | 36 | 40 | 38 | 78 | 40 | 50 | 47 | 46 | 44 |
| 13. | HD_Poptr_PHDf_HD_IV | 88 | 56 | 80 | 94 | 64 | 86 | 64 | 56 | 76 | 98 | 58 | 60 | | 66 | 72 | 42 | 66 | 42 | 39 | 35 | 33 |
| 14. | HD_Sacof_PHDf_HD | 74 | 60 | 94 | 76 | 64 | 72 | 62 | 56 | 62 | 76 | 60 | 62 | 78 | | 64 | 42 | 98 | 36 | 33 | 35 | 33 |
| 15. | HD_Vitvi_PHDf_HD_I | 82 | 60 | 80 | 86 | 70 | 80 | 60 | 58 | 74 | 88 | 62 | 64 | 88 | 82 | | 38 | 64 | 40 | 37 | 29 | 27 |
| 16. | HD_Vitvi_PHDf_HD_II | 64 | 76 | 66 | 66 | 82 | 68 | 64 | 74 | 56 | 66 | 84 | 84 | 66 | 64 | 68 | | 40 | 48 | 43 | 44 | 44 |
| 17. | HD_Zeama_PHDf_HD | 74 | 60 | 94 | 76 | 64 | 72 | 62 | 56 | 62 | 76 | 60 | 62 | 78 | 100 | 82 | 64 | | 36 | 33 | 35 | 33 |
| 18. | HD_Zeama_hox1a | 56 | 60 | 62 | 60 | 66 | 60 | 78 | 60 | 52 | 62 | 62 | 64 | 62 | 58 | 60 | 68 | 56 | | 86 | 60 | 56 |
| 19. | HD_Zeama_hox1b | 57 | 63 | 61 | 61 | 69 | 61 | 80 | 63 | 51 | 63 | 67 | 69 | 63 | 57 | 61 | 71 | 55 | 92 | | 59 | 53 |
| 20. | HD_Zeama_hox2a | 58 | 60 | 60 | 60 | 65 | 64 | 89 | 60 | 52 | 62 | 64 | 64 | 62 | 60 | 62 | 64 | 58 | 77 | 81 | | 90 |
| 21. | HD_Zeama_Hox2b | 56 | 56 | 56 | 56 | 62 | 58 | 85 | 54 | 48 | 58 | 60 | 60 | 58 | 56 | 58 | 62 | 54 | 71 | 77 | 92 | |

### Example 32

### Identification of Domains Comprised in Polypeptide Sequences Useful in Performing the Methods of the Invention

[1217] The Integrated Resource of Protein Families, Domains and Sites (InterPro) database is an integrated interface for the commonly used signature databases for text- and sequence-based searches. The InterPro database combines these databases, which use different methodologies and varying degrees of biological information about well-characterized proteins to derive protein signatures. Collaborating databases include SWISS-PROT, PROSITE, TrEMBL, PRINTS, Propom and Pfam, Smart and TIGRFAMs. Interpro is hosted at the European Bioinformatics Institute in the United Kingdom.

[1218] The results of the InterPro scan of the polypeptide sequence as represented by SEQ ID NO: 180 are presented in Table D5.

TABLE D5
InterPro scan results of the polypeptide sequence as represented by SEQ ID NO: 180

| | | | | Amino acid |
|---|---|---|---|---|
| | Integrated | Integrated | | coordinates on |
| InterPro | database | database | Integrated database | SEQ ID NO: |
| accession number | name | accession number | accession name | 180 |
| IPR0013556 | ProDom | PD000010 | PRH_ARATH_P48785 | 439-497 |
| Homeobox | | | | |
| IPR0013556 | PFAM | PF00046 | Homeobox | 439-495 |
| Homeobox | | | | |
| IPR0013556 | SMART | SM00389 | HOX | 438-500 |
| Homeobox | | | | |
| IPR0013556 | Profile | PS50071 | Homeobox_2 | 436-496 |
| Homeobox | | | | |
| IPR00195 | PFAM | PF00628 | PHD | 197-251 |
| Zinc-finger, PHD- | | | | |
| type | | | | |
| IPR00195 | SMART | SM00249 | PHD | 197-249 |
| Zinc-finger, PHD- | | | | |
| type | | | | |
| IPR00195 | Profile | PS50016 | ZF_PHD_2 | 195-251 |
| Zinc-finger, PHD- | | | | |
| type | | | | |
| IPR012287 | Gene3D | G3DSA:1.10.10.60 | No description | 436-501 |
| Homeodomain- | | | | |
| related | | | | |
| IPR013256 | SMART | SM00784 | No description | 78-154 |
| Chromatin SPT2 | | | | |
| Untegrated IPR | PANTHER | PTHR19418 | Homeobox protein | 397-414 |
| | | | | 431-590 |

The results of the InterPro scan clearly identifes the essential features of a PHDf-HD polypeptide, i.e., a PHDf zinc finger and homeobox, as represented for example respectively by Pfam entries PF00628 and PF00046.

[1219] HDs are known to have canonical residues. The HD of PHDf-HD polypeptides is highly divergent in sequence even at positions that are almost invariable among homeodomains. The sequence logo of the HD of the PHDf-HD polypeptides of Table D1, is shown in FIG. 15. Sequence logos are a graphical representation of an amino acid or nucleic acid multiple sequence alignment. Each logo consists of stacks of symbols, one stack for each position in the sequence. The overall height of the stack indicates the sequence conservation at that position, while the height of symbols within the stack indicates the relative frequency of each amino or nucleic acid at that position. In general, a sequence logo provides a richer and more precise description of, for example, a binding site, than would a consensus sequence. The algorithm (WebLogo) to produce such logos is available at the server of the University of California, Berkeley. The HD as represented by SEQ ID NO: 234, and comprised in SEQ ID NO: 180, is in accordance with the sequence logo as represented in FIG. 15. Polypeptides useful in performing the methods according to the invention comprise an HD comprised in the sequence logo as shown in FIG. 15.

### Example 33

### Prediction of Secondary Structure Features of the Polypeptide Sequences Useful in Performing the Methods of the Invention

[1220] Coiled coils usually contain a repeated seven amino acid residue pattern called heptad repeats. Coiled coils are important to identify for protein-protein interactions, such as oligomerization, either of identical proteins, of proteins of the same family, or of unrelated proteins. Recently much progress has been made in computational prediction of coiled coils from sequence data. Many algorithms well known to a person skilled in the art are available at the ExPASy Proteomics tools. One of them, COILS, is a program that compares a sequence to a database of known parallel two-stranded coiled-coils and derives a similarity score. By comparing this score to the distribution of scores in globular and coiled-coil proteins, the program then calculates the probability that the sequence will adopt a coiled-coil conformation.

[1221] The PHDf-HD polypeptide as represented by SEQ ID NO: 180, has two N-terminal predicted coiled coil domains, with a high probability, in all three windows (14, 21 and 28) examined. In Table D6, the residue coordinates, residues, the three windows and corresponding probability values are shown. In FIG. 16, is the graphical output of the COILS algorithm on the polypeptide as represented by SEQ ID NO: 180, where the two predicted coiled coils are clearly visible in the N-terminal half of the polypeptide, in all three windows (as represented by the three lines).

TABLE D6
Numerical output of the COILS algorithm on the polypeptide as represented
by SEQ ID NO: 180. The residue coordinates (#), residues, the three
windows and corresponding probability values are shown. Probabilities
above 0.09 are shown in grey.

| # | Residue | Window = 14 | Prob | Window = 21 | Prob | Window = 28 | Prob |
|---|---|---|---|---|---|---|---|
| 87 | P | d | 0.001 | e | 0.001 | E | 0.001 |
| 88 | T | e | 0.063 | f | 0.274 | F | 0.099 |
| 89 | R | f | 0.063 | g | 0.567 | G | 0.099 |
| 90 | R | g | 0.063 | a | 0.567 | A | 0.099 |
| 91 | K | b | 0.066 | b | 0.642 | B | 0.188 |
| 92 | H | c | 0.066 | c | 0.642 | C | 0.188 |
| 93 | K | d | 0.069 | d | 0.642 | D | 0.591 |
| 94 | Q | e | 0.178 | e | 0.642 | E | 0.672 |
| 95 | K | f | 0.335 | f | 0.642 | F | 0.672 |
| 96 | R | g | 0.335 | g | 0.642 | G | 0.772 |
| 97 | K | a | 0.335 | a | 0.642 | A | 0.772 |
| 98 | N | b | 0.347 | b | 0.642 | B | 0.772 |
| 99 | D | c | 0.347 | c | 0.642 | C | 0.772 |
| 100 | E | d | 0.347 | d | 0.642 | D | 0.772 |
| 101 | S | e | 0.347 | e | 0.642 | E | 0.808 |
| 102 | D | f | 0.347 | f | 0.642 | F | 0.808 |
| 103 | E | g | 0.347 | g | 0.642 | g | 0.808 |
| 104 | V | a | 0.347 | a | 0.642 | a | 0.808 |
| 105 | S | b | 0.347 | b | 0.642 | b | 0.808 |
| 106 | R | c | 0.347 | c | 0.642 | c | 0.808 |
| 107 | M | d | 0.347 | d | 0.642 | d | 0.808 |
| 108 | E | e | 0.347 | e | 0.642 | e | 0.808 |
| 109 | K | f | 0.347 | f | 0.642 | F | 0.808 |
| 110 | R | g | 0.347 | g | 0.642 | g | 0.808 |
| 111 | A | a | 0.347 | a | 0.642 | a | 0.808 |
| 112 | R | b | 0.307 | b | 0.514 | b | 0.808 |
| 113 | Y | c | 0.066 | c | 0.503 | c | 0.808 |
| 114 | L | d | 0.262 | d | 0.503 | d | 0.808 |
| 115 | L | e | 0.262 | e | 0.503 | e | 0.808 |
| 116 | I | f | 0.262 | f | 0.503 | F | 0.808 |
| 117 | K | g | 0.262 | g | 0.503 | g | 0.808 |
| 118 | I | a | 0.262 | a | 0.503 | a | 0.808 |
| 119 | K | b | 0.262 | b | 0.503 | b | 0.808 |
| 120 | Q | c | 0.262 | c | 0.503 | c | 0.808 |
| 121 | E | d | 0.262 | d | 0.503 | d | 0.808 |
| 122 | Q | e | 0.262 | e | 0.503 | e | 0.808 |
| 123 | N | f | 0.262 | f | 0.503 | F | 0.808 |
| 124 | L | g | 0.262 | g | 0.434 | g | 0.808 |
| 125 | L | a | 0.262 | a | 0.434 | a | 0.808 |
| 126 | D | b | 0.262 | b | 0.434 | b | 0.808 |
| 127 | A | c | 0.262 | c | 0.304 | c | 0.808 |
| 128 | Y | d | 0.145 | d | 0.304 | d | 0.808 |
| 129 | S | e | 0.145 | e | 0.044 | e | 0.808 |
| 130 | G | f | 0.119 | f | 0.009 | F | 0.367 |
| 131 | D | g | 0.078 | g | 0.007 | g | 0.136 |
| 132 | G | a | 0.002 | a | 0.001 | a | 0.005 |
| 133 | W | b | 0 | a | 0.001 | a | 0.001 |
| 134 | N | b | 0.001 | b | 0.045 | b | 0.057 |
| 135 | G | c | 0.001 | c | 0.045 | c | 0.057 |
| 136 | H | d | 0.003 | d | 0.07 | d | 0.219 |
| 137 | S | e | 0.008 | e | 0.132 | e | 0.231 |
| 138 | R | f | 0.025 | f | 0.357 | F | 0.231 |
| 139 | E | g | 0.025 | g | 0.357 | g | 0.231 |
| 140 | K | a | 0.025 | a | 0.357 | a | 0.231 |
| 141 | I | b | 0.028 | b | 0.357 | b | 0.231 |
| 142 | K | c | 0.07 | c | 0.357 | c | 0.462 |
| 143 | P | d | 0.07 | d | 0.357 | d | 0.462 |
| 144 | E | e | 0.998 | e | 0.997 | e | 0.974 |
| 145 | K | f | 0.998 | f | 0.997 | f | 0.974 |
| 146 | E | g | 0.998 | g | 0.997 | g | 0.974 |
| 147 | L | a | 0.998 | a | 0.997 | a | 0.974 |
| 148 | Q | b | 0.998 | b | 0.997 | b | 0.974 |
| 149 | R | c | 0.998 | c | 0.997 | c | 0.974 |
| 150 | A | d | 0.998 | d | 0.997 | d | 0.974 |
| 151 | K | e | 0.998 | e | 0.997 | e | 0.974 |
| 152 | K | f | 0.998 | f | 0.997 | f | 0.974 |
| 153 | Q | g | 0.998 | g | 0.997 | g | 0.974 |
| 154 | I | a | 0.998 | a | 0.997 | a | 0.974 |
| 155 | M | b | 0.998 | b | 0.997 | b | 0.974 |
| 156 | K | c | 0.998 | c | 0.997 | c | 0.974 |
| 157 | Y | d | 0.998 | d | 0.997 | d | 0.974 |
| 158 | K | e | 0.989 | e | 0.997 | e | 0.974 |
| 159 | I | f | 0.896 | f | 0.997 | f | 0.974 |
| 160 | A | g | 0.486 | g | 0.997 | g | 0.974 |
| 161 | I | a | 0.409 | a | 0.997 | a | 0.974 |
| 162 | R | b | 0.274 | b | 0.997 | b | 0.974 |
| 163 | D | c | 0.255 | c | 0.997 | c | 0.974 |
| 164 | V | d | 0.095 | d | 0.997 | d | 0.974 |
| 165 | I | e | 0.025 | e | 0.871 | e | 0.974 |
| 166 | H | f | 0.025 | f | 0.622 | f | 0.974 |
| 167 | Q | g | 0.025 | g | 0.496 | g | 0.974 |
| 168 | L | a | 0.025 | a | 0.496 | a | 0.974 |
| 169 | D | b | 0.025 | b | 0.468 | b | 0.974 |
| 170 | L | c | 0.005 | c | 0.111 | c | 0.974 |
| 171 | C | d | 0.002 | d | 0.02 | d | 0.974 |
| 172 | S | e | 0.001 | e | 0.007 | e | 0.719 |
| 173 | S | f | 0.001 | f | 0.003 | f | 0.482 |
| 174 | S | g | 0.001 | g | 0.001 | g | 0.066 |
| 175 | G | a | 0 | a | 0 | a | 0.001 |

[1222] Another coiled coil is predicted in the C-terminal half of the PHDf-HD polypeptide as represented by SEQ ID NO: 180, with a lower probability than the two coiled domains comprised in the N-terminal half of the polypeptide.

### Example 34

### Subcellular Localisation Prediction of the Polypeptide Sequences Useful in Performing the Methods of the Invention

[1223] LOCtree is an algorithm that can predict the subcellular localization and DNA-binding propensity of non-membrane proteins in non-plant and plant eukaryotes as well as prokaryotes. LOCtree classifies eukaryotic animal proteins into one of five subcellular classes, while plant proteins are classified into one of six classes and prokaryotic proteins are classified into one of three classes.

[1224] Whenever available, LOCtree also reports predictions based on the following: 1) Nuclear localization signals found by the PredictNLS algorithm, 2) Localization inferred using Prosite motifs and Pfam domains found in the protein, and 3) SWISS-PROT keywords associated with a protein. Localization is inferred in the last two cases using the entropy-based LOCkey algorithm. The software is hosted at the University of Columbia, USA.

[1225] Motif and keyword based prediction of subcellular localization of a PHDf-HD polypeptide as represented by SEQ ID NO: 180, using LOCkey:

| Predicted | | Alternative | SWISS-PROT keywords used |
|---|---|---|---|
| Localization | Confidence | prediction | to assign localization |
| Nuclear | 100 | — | Homeobox, DNA-binding, |
| | | | Transcription regulation, |
| | | | Nuclear protein, |
| | | | Transcription, Zinc-finger |

[1226] Prediction of a nuclear localisation signal (NLS) is done using PredictNLS algorithm, for example. The algorithm is also hosted by the server at the University of Columbia, USA. In the Table below, prediction of NLS on the polypeptide of SEQ ID NO: 180 using the PredictNLS algorithm, is shown.

| | | Coordinates on |
|---|---|---|
| Generalized motif ([KR]{3,5} | Hit on polypeptide of SEQ ID NO: | polypeptide of |
| between 3 and 5 times K or R) | 180 | SEQ ID NO: 180 |
| K[RK]{3,5}x{11,18}[RK]Kx{2,3}K | KRRRGSDAATGKSATGPTRRKHKQK | 71-95 |
| [KR]{4}x{20,24}K{1,4}xK | KRRRGSDAATGKSATGPTRRKHKQKRK | 71-97 |

[1227] In the polypeptide sequence below (SEQ ID NO: 180), the position of the predicted NLS is shown in bold and underlined twice:

MNTPEKKPLCYTSRRALQQRTESSSELISVSKRATRQNTPRKPDSPPK
RTTRSSANLAKCIENKHHSSPLKRRRGSDAATGKSATGPTRRKHK
QKRKNDESDEVSRMEKRARYLLIKIKQEQNLLDAYSGDGWNGHSRE
KIKPEKELQRAKKQIMKYKIAIRDVIHQLDLCSSSGSKDDSVIPPDGCHE
SVNPEHTICSRCKSHESFPDNNIIFCEGGCKLACHQKCLEPPFDKILPT
TRHGRLCKHCSSKMKILDAINAHLGTSFTVKCPSSDIFKEAAEHFNSDD
GLGQDWLSEYSGDEDYDPEENEASSSGEENKSADSNCSGSPLYSPNDD
IPDFISADFNDAEGFCRESSNLGIDFGEDGLAEILTHQRPRRDVDYTQLN
EQMFGEPIGNDEQSEDEDWGLNKRKKRRTGSTGVGTNSVEGRSDVKS
NKKAQPRRKLFRIPPAAVEVLRKAFAENELPARSVKENLSTELGISFEK
IDKWFKNTRCAALRDRKGESRYSGPSKRSRTSIEKAETSAKVDQMDNSCF
LPLSEIINVPTRLQKGLDKKPKSINSPPRPQDNETCLSPTDKTKEGTPPT
IKPSITDSSQLMNNDIGTEETAVSWVDTWASDALHFLDVSDDEHFFDV
IEKVCGLENRLQRLKENMLSSSSSTDNNVAAESGLQNEVVLVPAAEL
KDKAS

[1228] Many other algorithms can be used to perform such analyses, including:
[1229] ChloroP 1.1 hosted on the server of the Technical University of Denmark;
[1230] Protein Prowler Subcellular Localisation Predictor version 1.2 hosted on the server of the Institute for Molecular Bioscience, University of Queensland, Brisbane, Australia;
[1231] PENCE Proteome Analyst PA-GOSUB 2.5 hosted on the server of the University of Alberta, Edmonton, Alberta, Canada;
[1232] TMHMM, hosted on the server of the Technical University of Denmark

### Example 35

### Cloning of Nucleic Acid Sequence as Represented by SEQ ID NO: 179

[1233] Unless otherwise stated, recombinant DNA techniques were performed according to standard protocols described in (Sambrook (2001) Molecular Cloning: a laboratory manual, 3rd Edition Cold Spring Harbor Laboratory Press, CSI-1, New York) or in Volumes 1 and 2 of Ausubel et al. (1994), Current Protocols in Molecular Biology, Current Protocols. Standard materials and methods for plant molecular work are described in Plant Molecular Biology Labfax (1993) by R. D. D. Croy, published by BIOS Scientific Publications Ltd (UK) and Blackwell Scientific Publications (UK).

[1234] The Oryza sativa PHDf-HD gene was amplified by PCR using as template a rice cDNA bank synthesized from mRNA extracted from mixed plant tissues. Primer prm09687 (SEQ ID NO: 236; sense: 5′-ggggacaagtttgtacaaaaaagcaggcttaaacaatgaataccccagaaaa gaaa-3′) and primer prm09688 SEQ ID NO: 237; reverse, complementary: 5′-ggggaccacfttgtacaagaaagctgggtgatgcaaggttaagatgcttt-3′), which include the AttB sites for Gateway recombination, were used for PCR amplification. PCR was performed using Hifi Tag DNA polymerase in standard conditions. A PCR fragment of the expected length (including attB sites) was amplified and purified also using standard methods. The first step of the Gateway procedure, the BP reaction, was then performed, during which the PCR fragment recombined in vivo with the pDONR201 plasmid to produce, according to the Gateway terminology, an “entry clone”. Plasmid pDONR201 was purchased from Invitrogen, as part of the Gateway® technology.

### Example 36

### Expression Vector Construction Using the Nucleic Acid Sequence as Represented by SEQ ID NO: 179

[1235] The entry clone comprising SEQ ID NO: 179 was subsequently used in an LR reaction with a destination vector used for Oryza sativa transformation. This vector contained as functional elements within the T-DNA borders: a plant selectable marker; a screenable marker expression cassette; and a Gateway cassette intended for LR in vivo recombination with the nucleic acid sequence of interest already cloned in the entry clone. A rice GOS2 promoter (SEQ ID NO: 235) for constitutive expression was located upstream of this Gateway cassette.

[1236] After the LR recombination step, the resulting expression vector pGOS2::PHDf-HD and (FIG. 18) was transformed into Agrobacterium strain LBA4044 according to methods well known in the art.

### Example 37

### Plant Transformation

### Rice Transformation

[1237] The Agrobacterium containing the expression vectors were used independently to transform Oryza sativa plants. Mature dry seeds of the rice japonica cultivar Nipponbare were dehusked. Sterilization was carried out by incubating for one minute in 70% ethanol, followed by 30 minutes in 0.2% HgCl₂, followed by a 6 times 15 minutes wash with sterile distilled water. The sterile seeds were then germinated on a medium containing 2,4-D (callus induction medium). After incubation in the dark for four weeks, embryogenic, scutellum-derived calli were excised and propagated on the same medium. After two weeks, the calli were multiplied or propagated by subculture on the same medium for another 2 weeks. Embryogenic callus pieces were subcultured on fresh medium 3 days before co-cultivation (to boost cell division activity).

[1238] Agrobacterium strain LBA4404 containing each individual expression vector was used independently for co-cultivation. Agrobacterium was inoculated on AB medium with the appropriate antibiotics and cultured for 3 days at 28° C. The bacteria were then collected and suspended in liquid co-cultivation medium to a density (OD₆₀₀) of about 1. The suspension was then transferred to a Petri dish and the calli immersed in the suspension for 15 minutes. The callus tissues were then blotted dry on a filter paper and transferred to solidified, co-cultivation medium and incubated for 3 days in the dark at 25° C. Co-cultivated calli were grown on 2,4-D-containing medium for 4 weeks in the dark at 28° C. in the presence of a selection agent. During this period, rapidly growing resistant callus islands developed. After transfer of this material to a regeneration medium and incubation in the light, the embryogenic potential was released and shoots developed in the next four to five weeks. Shoots were excised from the calli and incubated for 2 to 3 weeks on an auxin-containing medium from which they were transferred to soil. Hardened shoots were grown under high humidity and short days in a greenhouse.

[1239] Approximately 35 independent T0 rice transformants were generated for each construct. The primary transformants were transferred from a tissue culture chamber to a greenhouse. After a quantitative PCR analysis to verify copy number of the T-DNA insert, only single copy transgenic plants that exhibit tolerance to the selection agent were kept for harvest of T1 seed. Seeds were then harvested three to five months after transplanting. The method yielded single locus transformants at a rate of over 50% (Aldemita and Hodges1996, Chan et al. 1993, Hiei et al., 1994).

### Example 38

### Phenotypic Evaluation Procedure

### 38.1 Evaluation Setup

[1240] Approximately 35 independent T0 rice transformants were generated. The primary transformants were transferred from a tissue culture chamber to a greenhouse for growing and harvest of T1 seed. Six events, of which the T1 progeny segregated 3:1 for presence/absence of the transgene, were retained. For each of these events, approximately 10 T1 seedlings containing the transgene (hetero- and homo-zygotes) and approximately 10 T1 seedlings lacking the transgene (nullizygotes) were selected by monitoring visual marker expression. The transgenic plants and the corresponding nullizygotes were grown side-by-side at random positions. Greenhouse conditions were of shorts days (12 hours light), 28° C. in the light and 22° C. in the dark, and a relative humidity of 70%. Plants grown under non-stress conditions are supplied with water at regular intervals to ensure that water and nutrients are not limiting to satisfy plant needs to complete growth and development.

[1241] From the stage of sowing until the stage of maturity the plants were passed several times through a digital imaging cabinet. At each time point digital images (2048×1536 pixels, 16 million colours) were taken of each plant from at least 6 different angles.

### 38.2 Statistical Analysis: F-Test

[1242] A two factor ANOVA (analysis of variants) was used as a statistical model for the overall evaluation of plant phenotypic characteristics. An F-test was carried out on all the parameters measured of all the plants of all the events transformed with the gene of the present invention. The F-test was carried out to check for an effect of the gene over all the transformation events and to verify for an overall effect of the gene, also known as a global gene effect. The threshold for significance for a true global gene effect was set at a 5% probability level for the F-test. A significant F-test value points to a gene effect, meaning that it is not only the mere presence or position of the gene that is causing the differences in phenotype.

[1243] 38.3 Parameters Measured

### Biomass-Related Parameter Measurement

[1244] From the stage of sowing until the stage of maturity the plants were passed several times through a digital imaging cabinet. At each time point digital images (2048×1536 pixels, 16 million colours) were taken of each plant from at least 6 different angles. The plant aboveground area (or leafy biomass) was determined by counting the total number of pixels on the digital images from aboveground plant parts discriminated from the background. This value was averaged for the pictures taken on the same time point from the different angles and was converted to a physical surface value expressed in square mm by calibration. Experiments show that the aboveground plant area measured this way correlates with the biomass of plant parts above ground. The above ground area is the area measured at the time point at which the plant had reached its maximal leafy biomass. The early vigour is the plant (seedling) aboveground area three weeks post-germination. Increase in root biomass is expressed as an increase in total root biomass (measured as maximum biomass of roots observed during the lifespan of a plant); or as an increase in the root/shoot index (measured as the ratio between root mass and shoot mass in the period of active growth of root and shoot).

### Seed-Related Parameter Measurements

[1245] The mature primary panicles were harvested, counted, bagged, barcode-labelled and then dried for three days in an oven at 37° C. The panicles were then threshed and all the seeds were collected and counted. The filled husks were separated from the empty ones using an air-blowing device. The empty husks were discarded and the remaining fraction was counted again. The filled husks were weighed on an analytical balance. The number of filled seeds was determined by counting the number of filled husks that remained after the separation step. The total seed weight per plant was measured by weighing all filled husks harvested from one plant. Total seed number per plant was measured by counting the number of husks harvested from a plant. Thousand Kernel Weight (TKW) is extrapolated from the number of filled seeds counted and their total weight. The Harvest Index (HI) in the present invention is defined as the ratio between the total seed weight per plant and the above ground area (mm²), multiplied by a factor 10⁶. The total number of flowers per panicle as defined in the present invention is the ratio between the total number of seeds and the number of mature primary panicles. The seed fill rate as defined in the present invention is the proportion (expressed as a %) of the number of filled seeds over the total number of seeds (or florets).

Reduced nutrient (nitrogen) availability screen

[1246] Rice plants from T2 seeds were grown in potting soil under normal conditions except for the nutrient solution. The pots were watered from transplantation to maturation with a specific nutrient solution containing reduced N nitrogen (N) content, usually between 7 to 8 times less. The rest of the cultivation (plant maturation, seed harvest) was the same as for plants not grown under abiotic stress. Growth and yield parameters were recorded as detailed for growth under normal conditions.

### Example 39

### Results of the Phenotypic Evaluation of the Transgenic Rice Plants

[1247] The results of the evaluation of transgenic rice plants expressing the nucleic acid sequence encoding a PHDf-HD polypeptide as represented by SEQ ID NO: 180, under the control of the GOS2 promoter for constitutive expression, are presented below.

[1248] There was a significant increase in the number of panicles, in the total seed yield per plant, in the total number of filled seeds, in the total number of seeds, in the Thousand Kernel Weight (TKW), and in the harvest index of the transgenic plants compared to corresponding nullizygotes (controls), as shown in Table D7.

TABLE D7
Results of the evaluation of transgenic rice plants expressing the
nucleic acid sequence encoding a PHDf-HD polypeptide as
represented by SEQ ID NO: 180, under the control of the GOS2
promoter for constitutive expression.

| | Average % increase in 3 |
|---|---|
| | events in the T1 generation |
| Number of first panicles | 22% |
| Total seed yield per plant | 30% |
| Total number of filled seeds | 24% |
| Total number of seeds | 24% |
| TKW | 4% |
| Harvest index | 17% |

### Example 40

### Results of the Phenotypic Evaluation of the Transgenic Rice Plants Grown Under Reduced Nutrient Availability

[1249] The results of the evaluation of transgenic rice plants expressing the nucleic acid sequence encoding a PHDf-HD polypeptide as represented by SEQ ID NO: 180, under the control of the GOS2 promoter for constitutive expression, and grown under reduced nutrient availability, are presented below.

[1250] There was a significant increase in biomass, in emergeance vigor, in the total seed yield per plant, in the total number of filled seeds, in the seed filling rate, in the total number of seeds, in the Thousand Kernel Weight (TKW), and in the harvest index of the transgenic plants compared to corresponding nullizygotes (controls), as shown in Table D8.

TABLE D8
Results of the evaluation of transgenic rice plants expressing the
nucleic acid sequence encoding a PHDf-HD polypeptide as represented
by SEQ ID NO: 180, under the control of the GOS2 promoter for
constitutive expression, and grown under reduced nutrient availability.

| | Overall average % increase |
|---|---|
| | (6 events in the T2 generation) |
| Biomass | 8% |
| Emergeance vigor | 20% |
| Total seed yield per plant | 17% |
| Total number of filled seeds | 12% |
| Seed filling rate | 3% |
| Total number of seeds | 9% |
| TKW | 5% |
| Harvest index | 9% |

### Example 41

### Examples of Transformation of Other Crops

[1251] Transformation of corn, wheat, soybean, rapeseed/canola, alfalfa and cotton was carried out as outlined in Example 7

### Example 42

### Examples of Abiotic Stress Screens

### Drought Screen

[1252] Plants from a selected number of events are grown in potting soil under normal conditions until they approached the heading stage. They are then transferred to a “dry” section where irrigation is withheld. Humidity probes are inserted in randomly chosen pots to monitor the soil water content (SWC). When SWC go below certain thresholds, the plants are automatically re-watered continuously until a normal level is reached again. The plants are then re-transferred to normal conditions. The rest of the cultivation (plant maturation, seed harvest) is the same as for plants not grown under abiotic stress conditions. Growth and yield parameters are recorded as detailed for growth under normal conditions.

### Salt Stress Screen

[1253] Plants are grown on a substrate made of coco fibers and argex (3 to 1 ratio). A normal nutrient solution is used during the first two weeks after transplanting the plantlets in the greenhouse. After the first two weeks, 25 mM of salt (NaCl) is added to the nutrient solution, until the plants were harvested. Growth and yield parameters are recorded as detailed for growth under normal conditions.

VIII. bHLH11-Like (Basic Helix-Loop-Helix 11) Protein

### Example 43

### Identification of Sequences Related to the bHLH11-Like Nucleic Acid Sequence Used in the Methods of the Invention

[1254] Sequences (full length cDNA, ESTs or genomic) related to the nucleic acid sequence used in the methods of the present invention were identified amongst those maintained in the Entrez Nucleotides database at the National Center for Biotechnology Information (NCBI) using database sequence search tools, such as the Basic Local Alignment Tool (BLAST) (Altschul et al. (1990) J. Mol. Biol. 215:403-410; and Altschul et al. (1997) Nucleic Acids Res. 25:3389-3402). The program is used to find regions of local similarity between sequences by comparing nucleic acid or polypeptide sequences to sequence databases and by calculating the statistical significance of matches. For example, the polypeptide encoded by the nucleic acid used in the present invention was used for the TBLASTN algorithm, with default settings and the filter to ignore low complexity sequences set off. The output of the analysis was viewed by pairwise comparison, and ranked according to the probability score (E-value), where the score reflect the probability that a particular alignment occurs by chance (the lower the E-value, the more significant the hit). In addition to E-values, comparisons were also scored by percentage identity. Percentage identity refers to the number of identical nucleotides (or amino acids) between the two compared nucleic acid (or polypeptide) sequences over a particular length. In some instances, the default parameters may be adjusted to modify the stringency of the search. For example the E-value may be increased to show less stringent matches. This way, short nearly exact matches may be identified. Table E1 provides a list of nucleic acid sequences related to the nucleic acid sequence used in the methods of the present invention.

TABLE E1
Examples of bHLH11-like polypeptides:

| | Nucleic acid | Protein |
|---|---|---|
| Plant Source | SEQ ID NO: | SEQ ID NO: |
| Triticum aestivum | 244 | 245 |
| Allium cepa | 258 | 327 |
| Arabidopsis thaliana | 259 | 328 |
| Arabidopsis thaliana | 260 | 329 |
| Arabidopsis thaliana | 261 | 330 |
| Arabidopsis thaliana | 262 | 331 |
| Arabidopsis thaliana | 263 | 332 |
| Aquilegia vulgaris | 264 | 333 |
| Aquilegia vulgaris | 265 | 334 |
| Brassica napus | 266 | 335 |
| Citrus clementina | 267 | 336 |
| Curcuma longa | 268 | 337 |
| Citrus paridisi hybrid | 269 | 338 |
| Citrus sinensis | 270 | 339 |
| Eucalyptus grandis | 271 | 340 |
| Eucalyptus grandis | 272 | 341 |
| Gossypium hirsutum | 273 | 342 |
| Gossypium hirsutum | 274 | 343 |
| Gossypium hirsutum | 275 | 344 |
| Gossypium hirsutum | 276 | 345 |
| Gossypium hirsutum | 277 | 346 |
| Gossypium hirsutum | 278 | 347 |
| Glycine max | 279 | 348 |
| Glycine max | 280 | 349 |
| Glycine max | 281 | 350 |
| Glycine max | 282 | 351 |
| Gossypium raimondii | 283 | 352 |
| Helianthus petiolaris | 284 | 353 |
| Hordeum vulgare | 285 | 354 |
| Lactuca perennis | 286 | 355 |
| Nicotiana benthamiana | 287 | 356 |
| Nicotiana benthamiana | 288 | 357 |
| Nicotiana benthamiana | 289 | 358 |
| Nicotiana benthamiana | 290 | 359 |
| Nicotiana tabacum | 291 | 360 |
| Oryza sativa | 292 | 361 |
| Oryza sativa | 293 | 362 |
| Oryza sativa | 294 | 363 |
| Oryza sativa | 295 | 364 |
| Oryza sativa | 296 | 365 |
| Oryza sativa | 297 | 366 |
| Oryza sativa | 298 | 367 |
| Picea abies | 299 | 368 |
| Populus deltoides | 300 | 369 |
| Pinus radiata | 301 | 370 |
| Picea sitchensis | 302 | 371 |
| Pinus taeda | 303 | 372 |
| Populus trichocarpa | 304 | 373 |
| Populus trichocarpa | 305 | 374 |
| Populus trichocarpa | 306 | 375 |
| Populus trichocarpa | 307 | 376 |
| Populus trichocarpa | 308 | 377 |
| Poncirus trifoliata | 309 | 378 |
| Ricinus communis | 310 | 379 |
| Ricinus communis | 311 | 380 |
| Sorghum bicolor | 312 | 381 |
| Solanum lycopersicum | 313 | 382 |
| Solanum lycopersicum | 314 | 383 |
| Solanum lycopersicum | 315 | 384 |
| Solanum tuberosum | 316 | 385 |
| Solanum tuberosum | 317 | 386 |
| Solanum tuberosum | 318 | 387 |
| Solanum tuberosum | 319 | 388 |
| Triticum aestivum | 320 | 389 |
| Vitis vinifera | 321 | 390 |
| Vitis vinifera | 322 | 391 |
| Vitis vinifera | 323 | 392 |
| Vitis vinifera | 324 | 393 |
| Zea mays | 325 | 394 |
| Zea mays | 326 | 395 |

[1255] In some instances, related sequences have tentatively been assembled and publicly disclosed by research institutions, such as The Institute for Genomic Research (TIGR). The Eukaryotic Gene Orthologs (EGO) database may be used to identify such related sequences, either by keyword search or by using the BLAST algorithm with the nucleic acid or polypeptide sequence of interest.

### Example 44

### Alignment of bHLH11-Like Polypeptide Sequences

[1256] Alignment of polypeptide sequences was performed using the AlignX programme from the Vector NTI (Invitrogen) which is based on the popular Clustal W algorithm of progressive alignment (Thompson et al. (1997) Nucleic Acids Res 25:4876-4882; Chema et al. (2003). Nucleic Acids Res 31:3497-3500). Default values are for the gap open penalty of 10, for the gap extension penalty of 0,1 and the selected weight matrix is Blosum 62 (if polypeptides are aligned). Minor manual editing was done to further optimise the alignment. Sequence conservation among bHLH11-like polypeptides is essentially in the C-terminal bHLH domain of the polypeptides, the N-terminal domain usually being more variable in sequence length and composition. The bHLH11-like polypeptides are aligned in FIG. 21.

[1257] A phylogenetic tree of bHLH11-like polypeptides (FIG. 22) was constructed using “CLUSTALX”, and a neighbour-joining tree was calculated. The circular cladogram was drawn using Dendroscope (Huson et al., 2007).

### Example 45

### Calculation of Global Percentage Identity Between Polypeptide Sequences Useful in Performing the Methods of the Invention

[1258] Global percentages of similarity and identity between full length polypeptide sequences useful in performing the methods of the invention were determined using one of the methods available in the art, the MatGAT (Matrix Global Alignment Tool) software (BMC Bioinformatics. 2003 4:29. MatGAT: an application that generates similarity/identity matrices using protein or DNA sequences. Campanella J J, Bitincka L, Smalley J; software hosted by Ledion Bitincka). MatGAT software generates similarity/identity matrices for DNA or protein sequences without needing pre-alignment of the data. The program performs a series of pair-wise alignments using the Myers and Miller global alignment algorithm (with a gap opening penalty of 12, and a gap extension penalty of 2), calculates similarity and identity using for example Blosum 62 (for polypeptides), and then places the results in a distance matrix. Sequence similarity is shown in the bottom half of the dividing line and sequence identity is shown in the top half of the diagonal dividing line.

[1259] Parameters used in the comparison were:
[1260] Scoring matrix: Blosum62
[1261] First Gap: 12
[1262] Extending gap: 2

[1263] Results of the software analysis are shown in Table E2 for the global similarity and identity over the full length of the polypeptide sequences. Percentage identity is given above the diagonal and percentage similarity is given below the diagonal. SEQ ID NO: 245 is represented as TabHLH11.

[1264] The percentage identity between the bHLH11-like polypeptide sequences useful in performing the methods of the invention can be as low as 20% amino acid identity compared to SEQ ID NO: 245. The identity is however much higher when the HLH domains are compared (Table E3).

TABLE E2
MatGAT results for global similarity and identity over the full length of the bHLH11-like polypeptide sequences.

| | | 1 | 2 | 3 | 4 | 5 | 6 | 7 | 8 | 9 | 10 | 11 | 12 | 13 | 14 | 15 | 16 |
|---|---|---|---|---|---|---|---|---|---|---|---|---|---|---|---|---|---|
| 1. | TC3698 | | 51.1 | 53.5 | 15.9 | 39.5 | 37.1 | 49.4 | 19.5 | 53.8 | 45.8 | 36.3 | 53.7 | 30.6 | 52.0 | 46.5 | 51.0 |
| 2. | AT1G03040 | 63.2 | | 81.0 | 16.3 | 37.8 | 36.3 | 52.4 | 19.9 | 72.3 | 40.5 | 35.9 | 64.6 | 31.1 | 50.7 | 59.5 | 45.9 |
| 3. | AT4G02590 | 64.2 | 89.0 | | 17.0 | 37.0 | 35.1 | 55.2 | 18.8 | 82.4 | 43.0 | 35.4 | 69.5 | 33.8 | 53.5 | 64.6 | 47.6 |
| 4. | AT2G24260 | 21.7 | 22.0 | 22.3 | | 27.7 | 19.7 | 16.4 | 12.7 | 15.6 | 17.0 | 19.0 | 15.8 | 23.0 | 15.8 | 15.8 | 16.8 |
| 5. | AT4G30980 | 53.2 | 53.9 | 52.6 | 30.6 | | 46.4 | 36.0 | 22.0 | 35.5 | 38.7 | 40.6 | 35.1 | 41.3 | 36.3 | 32.6 | 36.2 |
| 6. | AT5G58010 | 53.9 | 55.0 | 52.6 | 23.8 | 58.1 | | 32.6 | 24.2 | 34.0 | 35.4 | 37.1 | 36.0 | 35.7 | 31.6 | 32.3 | 35.5 |
| 7. | TC15501 | 58.4 | 64.1 | 65.5 | 22.1 | 49.9 | 48.1 | | 17.5 | 52.8 | 47.0 | 37.0 | 56.0 | 35.1 | 57.8 | 59.2 | 52.8 |
| 8. | TC19278 | 31.9 | 31.1 | 30.0 | 15.6 | 33.2 | 35.0 | 26.8 | | 18.8 | 21.1 | 16.4 | 19.5 | 18.9 | 17.8 | 17.6 | 17.5 |
| 9. | TC10015_part | 64.9 | 80.5 | 85.8 | 19.9 | 50.6 | 52.2 | 60.4 | 31.7 | | 41.9 | 35.6 | 72.5 | 30.8 | 52.5 | 59.7 | 47.1 |
| 10. | DY268946 | 56.8 | 55.9 | 59.1 | 23.8 | 52.5 | 46.4 | 61.0 | 31.6 | 53.0 | | 34.5 | 42.7 | 32.9 | 52.7 | 43.2 | 50.8 |
| 11. | TA2544 | 47.3 | 46.8 | 47.8 | 26.1 | 49.3 | 46.3 | 49.0 | 23.9 | 45.6 | 47.6 | | 35.0 | 44.9 | 38.4 | 35.9 | 36.4 |
| 12. | TA3392 | 68.1 | 76.8 | 79.4 | 21.7 | 51.9 | 52.2 | 63.0 | 32.7 | 84.0 | 56.2 | 43.7 | | 30.9 | 53.0 | 68.7 | 49.4 |
| 13. | TA12416 | 38.0 | 38.2 | 40.7 | 30.4 | 48.4 | 43.3 | 46.3 | 25.8 | 37.3 | 43.7 | 54.6 | 40.3 | | 32.2 | 32.4 | 33.1 |
| 14. | WO051050seqID77 | 61.3 | 63.8 | 66.3 | 20.8 | 51.3 | 50.9 | 66.4 | 28.1 | 61.9 | 65.8 | 45.4 | 61.3 | 39.4 | | 53.2 | 58.7 |
| 15. | WO051050seqID1671 | 56.9 | 70.5 | 74.9 | 22.3 | 46.5 | 47.1 | 70.9 | 27.5 | 68.5 | 59.0 | 47.3 | 75.4 | 42.0 | 64.5 | | 46.8 |
| 16. | TA55042 | 62.5 | 59.5 | 62.8 | 22.4 | 51.7 | 52.0 | 65.8 | 27.8 | 58.0 | 67.0 | 48.8 | 58.9 | 42.4 | 69.2 | 62.7 | |
| 17. | TC207545 | 60.7 | 66.6 | 68.1 | 20.1 | 51.0 | 51.5 | 57.0 | 38.5 | 71.6 | 53.9 | 42.9 | 74.7 | 36.7 | 56.9 | 64.5 | 56.8 |
| 18. | TA13791 | 63.7 | 80.5 | 82.6 | 22.1 | 52.6 | 54.8 | 68.1 | 31.7 | 78.2 | 59.4 | 48.3 | 83.5 | 43.1 | 65.0 | 78.0 | 63.1 |
| 19. | CO123623 | 61.4 | 57.3 | 58.7 | 19.3 | 49.7 | 53.9 | 58.1 | 32.8 | 62.6 | 64.3 | 42.9 | 65.1 | 38.2 | 65.6 | 55.2 | 65.6 |
| 20. | DT543504 | 52.0 | 55.2 | 54.8 | 22.3 | 51.3 | 52.6 | 47.3 | 37.9 | 49.7 | 50.4 | 42.7 | 55.2 | 39.7 | 51.9 | 51.4 | 50.5 |
| 21. | TC60118 | 63.4 | 80.2 | 82.3 | 22.0 | 52.3 | 54.5 | 67.8 | 31.7 | 77.9 | 59.1 | 48.0 | 83.2 | 42.9 | 64.7 | 77.7 | 62.8 |
| 22. | TC60119 | 65.1 | 78.9 | 82.9 | 21.1 | 51.9 | 53.3 | 67.0 | 30.6 | 77.3 | 58.6 | 47.6 | 82.6 | 40.5 | 65.6 | 76.6 | 60.7 |
| 23. | TC61833 | 63.6 | 78.4 | 81.9 | 21.9 | 54.2 | 55.4 | 66.1 | 30.2 | 77.0 | 56.8 | 47.6 | 82.3 | 40.7 | 65.0 | 76.9 | 62.5 |
| 24. | TC67603 | 40.3 | 43.3 | 42.4 | 28.8 | 48.7 | 45.9 | 47.5 | 26.9 | 40.7 | 45.7 | 56.7 | 42.9 | 67.0 | 43.1 | 42.9 | 45.7 |
| 25. | TC229602 | 56.8 | 60.3 | 61.0 | 18.9 | 45.8 | 49.2 | 50.7 | 45.2 | 63.3 | 49.9 | 38.0 | 65.1 | 33.5 | 52.5 | 57.5 | 52.3 |
| 26. | TC205173 | 50.4 | 51.0 | 48.7 | 25.3 | 58.5 | 54.6 | 53.3 | 34.3 | 47.2 | 52.5 | 52.2 | 47.5 | 54.6 | 51.3 | 48.0 | 54.6 |
| 27. | TA1140 | 63.4 | 64.1 | 64.5 | 21.5 | 55.2 | 53.9 | 64.7 | 31.0 | 62.7 | 55.1 | 45.1 | 63.1 | 42.2 | 65.3 | 60.1 | 64.0 |
| 28. | TC140470 | 37.6 | 38.5 | 38.0 | 26.6 | 35.8 | 36.4 | 41.2 | 22.2 | 34.9 | 37.0 | 43.7 | 37.4 | 48.0 | 38.0 | 40.3 | 40.3 |
| 29. | TA3490_part | 67.6 | 64.6 | 64.2 | 22.0 | 53.2 | 54.5 | 62.1 | 32.4 | 65.2 | 58.0 | 45.6 | 67.9 | 41.4 | 63.4 | 59.5 | 63.4 |
| 30. | CK293938 | 67.6 | 64.2 | 65.2 | 20.6 | 53.9 | 54.2 | 61.5 | 32.1 | 65.2 | 60.0 | 45.6 | 66.2 | 41.4 | 68.4 | 60.1 | 64.0 |
| 31. | TC8633 | 64.6 | 78.8 | 79.0 | 22.5 | 53.9 | 56.3 | 68.1 | 31.8 | 74.5 | 56.5 | 45.1 | 75.5 | 41.8 | 65.3 | 71.1 | 62.5 |
| 32. | TC7102 | 39.7 | 42.4 | 42.9 | 30.0 | 49.2 | 44.2 | 46.3 | 25.1 | 39.7 | 44.7 | 56.9 | 40.6 | 69.7 | 43.6 | 44.2 | 43.6 |
| 33. | TC7103 | 45.0 | 46.0 | 46.3 | 26.7 | 53.2 | 51.2 | 48.8 | 27.9 | 45.0 | 46.5 | 57.1 | 45.2 | 65.0 | 46.3 | 50.4 | 49.4 |
| 34. | TC12771 | 66.1 | 64.9 | 65.5 | 21.2 | 54.8 | 54.4 | 61.5 | 30.9 | 64.4 | 59.7 | 45.6 | 65.1 | 40.9 | 67.2 | 59.8 | 64.0 |
| 35. | Os03g58330 | 67.7 | 61.9 | 61.3 | 21.3 | 53.9 | 54.2 | 58.7 | 32.7 | 62.6 | 55.9 | 45.4 | 61.6 | 39.2 | 62.2 | 53.8 | 61.9 |
| 36. | Os06g08500 | 43.6 | 43.6 | 45.0 | 23.6 | 45.0 | 48.2 | 47.7 | 28.6 | 42.0 | 43.3 | 51.5 | 44.1 | 46.5 | 44.1 | 45.2 | 46.6 |
| 37. | Os06g09370 | 37.7 | 37.4 | 38.1 | 26.8 | 35.1 | 34.1 | 40.0 | 22.2 | 34.1 | 40.6 | 44.1 | 38.5 | 44.4 | 38.5 | 40.6 | 42.7 |
| 38. | Os02g55250 | 40.6 | 42.0 | 41.5 | 28.5 | 43.5 | 44.4 | 45.1 | 25.2 | 39.2 | 46.0 | 55.8 | 40.8 | 56.3 | 44.0 | 41.7 | 46.3 |
| 39. | Os02g35660 | 35.7 | 35.1 | 36.6 | 29.2 | 36.5 | 34.4 | 39.3 | 22.9 | 33.6 | 38.5 | 43.1 | 34.9 | 45.4 | 36.6 | 39.5 | 37.0 |
| 40. | Os07g08440 | 70.3 | 60.3 | 65.5 | 20.8 | 52.3 | 56.9 | 58.4 | 33.8 | 63.8 | 57.1 | 44.6 | 63.8 | 38.8 | 62.5 | 57.8 | 61.9 |
| 41. | Os09g25040 | 37.3 | 35.7 | 38.5 | 30.0 | 40.1 | 38.5 | 41.5 | 24.4 | 36.1 | 38.7 | 54.3 | 37.7 | 60.7 | 39.3 | 41.5 | 39.3 |
| 42. | Pt_scaff_II.416 | 62.7 | 79.5 | 81.9 | 22.4 | 53.5 | 53.7 | 66.7 | 31.3 | 78.7 | 58.3 | 47.3 | 84.3 | 42.0 | 65.6 | 78.3 | 62.2 |
| 43. | Pt_scaff_70.65 | 60.7 | 62.2 | 65.9 | 21.9 | 52.3 | 49.2 | 65.8 | 27.5 | 60.7 | 69.9 | 44.9 | 60.7 | 40.3 | 71.9 | 64.5 | 74.6 |
| 44. | Pt_scaff_XIII.403 | 59.9 | 62.0 | 62.3 | 21.2 | 50.6 | 49.7 | 66.1 | 28.1 | 58.7 | 67.0 | 45.4 | 59.0 | 42.2 | 69.2 | 65.9 | 73.1 |
| 45. | Pt_scaff28.86 | 39.5 | 39.3 | 40.8 | 27.2 | 39.3 | 38.8 | 42.5 | 29.4 | 36.2 | 43.4 | 45.6 | 39.9 | 48.0 | 40.1 | 42.1 | 42.3 |
| 46. | Pt_TC63334 | 65.0 | 79.8 | 81.6 | 22.1 | 54.8 | 52.3 | 68.7 | 31.3 | 78.7 | 58.0 | 47.6 | 84.3 | 42.6 | 65.0 | 77.2 | 62.5 |
| 47. | TA14134 | 46.2 | 49.8 | 50.8 | 24.7 | 50.5 | 50.2 | 49.3 | 37.5 | 43.7 | 52.5 | 44.6 | 45.2 | 41.2 | 50.2 | 47.1 | 51.4 |
| 48. | TA5414 | 38.0 | 38.5 | 41.2 | 30.1 | 48.5 | 42.7 | 45.9 | 25.9 | 37.8 | 42.9 | 55.8 | 41.2 | 98.9 | 41.2 | 42.1 | 42.7 |
| 49. | TA3263 | 65.3 | 79.5 | 81.6 | 22.3 | 54.8 | 54.0 | 68.4 | 31.7 | 79.0 | 58.3 | 48.3 | 84.7 | 42.6 | 65.0 | 77.2 | 62.8 |
| 50. | TA2825 | 65.2 | 80.1 | 83.9 | 22.0 | 53.2 | 54.2 | 66.7 | 32.1 | 80.3 | 55.9 | 47.3 | 86.0 | 41.6 | 66.6 | 79.5 | 63.7 |
| 51. | TA1616 | 61.0 | 65.3 | 66.3 | 22.3 | 52.1 | 50.3 | 70.4 | 28.8 | 60.4 | 70.4 | 47.8 | 62.9 | 41.6 | 74.2 | 63.9 | 73.4 |
| 52. | TA21665 | 66.2 | 65.2 | 63.9 | 21.3 | 52.3 | 53.2 | 60.4 | 31.1 | 63.5 | 58.3 | 44.4 | 67.6 | 42.9 | 64.4 | 59.5 | 61.0 |
| 53. | TC172581 | 64.5 | 63.8 | 67.1 | 21.1 | 52.9 | 53.9 | 61.0 | 30.6 | 62.2 | 60.0 | 46.6 | 66.1 | 41.8 | 66.3 | 61.3 | 63.4 |
| 54. | AK247217 | 64.6 | 80.5 | 80.3 | 22.9 | 52.3 | 52.0 | 70.1 | 31.5 | 75.2 | 56.2 | 45.1 | 78.1 | 42.0 | 67.8 | 72.5 | 64.4 |
| 55. | TC104646 | 69.5 | 61.6 | 61.9 | 20.7 | 51.0 | 53.5 | 58.7 | 35.0 | 67.3 | 55.7 | 42.0 | 63.3 | 39.2 | 60.3 | 56.1 | 59.8 |
| 56. | DV982110 | 59.3 | 55.6 | 53.5 | 22.6 | 55.8 | 57.9 | 51.0 | 38.0 | 55.8 | 51.3 | 44.9 | 61.6 | 41.6 | 53.4 | 49.1 | 51.7 |
| 57. | WO051050seqID516 | 40.2 | 42.5 | 42.3 | 28.0 | 44.1 | 42.3 | 46.4 | 27.0 | 39.3 | 46.9 | 53.3 | 42.5 | 52.5 | 44.1 | 43.6 | 43.8 |
| 58. | TC68930 | 48.3 | 49.2 | 49.5 | 25.9 | 49.5 | 53.5 | 47.0 | 38.4 | 45.6 | 51.3 | 47.3 | 47.4 | 42.0 | 50.5 | 46.2 | 52.0 |
| 59. | TA30646 | 64.6 | 79.8 | 80.0 | 22.1 | 52.6 | 52.3 | 68.7 | 31.5 | 75.8 | 55.7 | 44.6 | 78.1 | 41.2 | 67.2 | 72.8 | 64.4 |
| 60. | TA28621 | 65.8 | 64.1 | 67.1 | 21.3 | 53.2 | 52.3 | 61.5 | 30.3 | 62.8 | 60.9 | 46.8 | 67.1 | 41.6 | 65.6 | 61.8 | 64.4 |
| 61. | TA34455 | 40.3 | 41.6 | 41.2 | 29.5 | 49.7 | 43.4 | 45.9 | 23.0 | 38.0 | 45.6 | 59.3 | 41.4 | 67.0 | 43.4 | 43.8 | 44.7 |
| 62. | TA37666 | 45.5 | 46.6 | 48.7 | 27.4 | 53.9 | 48.2 | 51.8 | 28.3 | 43.7 | 50.3 | 60.7 | 47.1 | 63.1 | 48.4 | 48.4 | 49.0 |
| 63. | TC253044 | 56.6 | 54.0 | 51.6 | 19.7 | 50.3 | 53.9 | 49.3 | 36.9 | 53.4 | 45.8 | 42.9 | 55.5 | 39.0 | 50.9 | 48.8 | 51.1 |
| 64. | TabHLH11 | 71.2 | 60.9 | 61.0 | 19.9 | 50.6 | 56.6 | 57.0 | 34.2 | 66.2 | 55.9 | 42.7 | 66.2 | 38.8 | 59.7 | 55.8 | 60.1 |
| 65. | TA46156 | 67.5 | 76.8 | 78.4 | 22.3 | 54.8 | 55.2 | 66.4 | 33.6 | 78.9 | 58.6 | 45.9 | 84.1 | 40.5 | 64.7 | 74.6 | 64.0 |
| 66. | GSVIVT00017237001 | 43.5 | 42.1 | 43.1 | 29.4 | 48.1 | 45.2 | 47.4 | 27.5 | 40.4 | 47.8 | 59.1 | 40.4 | 69.5 | 44.0 | 45.5 | 45.7 |
| 67. | TA46194 | 66.1 | 69.0 | 71.9 | 22.3 | 52.1 | 53.4 | 70.9 | 29.7 | 67.4 | 63.5 | 49.0 | 69.0 | 41.8 | 72.5 | 68.8 | 68.3 |
| 68. | GSVIVT00016367001 | 35.7 | 37.7 | 36.5 | 24.5 | 38.1 | 36.9 | 41.6 | 24.1 | 34.4 | 41.9 | 44.5 | 35.5 | 46.2 | 37.7 | 40.8 | 38.6 |
| 69. | TA139285 | 70.2 | 59.9 | 61.3 | 20.3 | 51.6 | 56.2 | 59.5 | 34.4 | 62.1 | 58.0 | 43.4 | 63.2 | 37.5 | 62.5 | 54.6 | 61.9 |
| 70. | TA126400 | 69.5 | 61.9 | 62.6 | 20.9 | 54.5 | 52.5 | 57.3 | 34.0 | 66.7 | 56.8 | 44.9 | 65.3 | 41.4 | 61.6 | 56.1 | 61.0 |
| | | 17 | 18 | 19 | 20 | 21 | 22 | 23 | 24 | 25 | 26 | 27 | 28 | 29 | 30 | 31 | 32 |
| 1. | TC3698 | 52.2 | 51.7 | 51.2 | 34.6 | 51.4 | 53.4 | 51.7 | 31.6 | 48.5 | 38.8 | 52.7 | 25.4 | 54.5 | 53.0 | 53.0 | 32.7 |
| 2. | AT1G03040 | 58.4 | 68.1 | 45.3 | 37.0 | 67.8 | 67.2 | 67.6 | 33.9 | 54.3 | 35.3 | 49.2 | 26.3 | 50.9 | 48.0 | 65.5 | 33.7 |
| 3. | AT4G02590 | 62.6 | 72.6 | 47.0 | 36.4 | 72.3 | 73.6 | 73.3 | 32.8 | 57.1 | 37.7 | 50.3 | 27.5 | 52.6 | 49.5 | 67.5 | 34.3 |
| 4. | AT2G24260 | 15.9 | 16.8 | 15.4 | 17.2 | 16.7 | 16.3 | 16.6 | 22.0 | 15.0 | 21.5 | 16.1 | 15.4 | 16.6 | 16.1 | 16.8 | 23.1 |
| 5. | AT4G30980 | 37.7 | 36.1 | 37.4 | 37.2 | 36.1 | 35.9 | 36.2 | 40.8 | 34.8 | 44.8 | 36.2 | 26.7 | 36.5 | 36.1 | 35.4 | 41.8 |
| 6. | AT5G58010 | 38.8 | 36.0 | 38.1 | 39.2 | 36.0 | 36.4 | 36.3 | 37.2 | 36.9 | 47.3 | 37.7 | 28.1 | 37.8 | 36.9 | 37.9 | 36.0 |
| 7. | TC15501 | 52.4 | 60.9 | 51.0 | 31.4 | 60.7 | 59.0 | 58.0 | 36.2 | 47.9 | 37.1 | 54.0 | 30.8 | 53.8 | 53.8 | 58.7 | 38.2 |
| 8. | TC19278 | 23.0 | 20.2 | 19.4 | 27.6 | 20.2 | 20.2 | 19.6 | 18.4 | 27.3 | 23.1 | 18.0 | 15.6 | 19.0 | 19.3 | 20.5 | 17.9 |
| 9. | TC10015_part | 61.4 | 68.0 | 51.4 | 35.2 | 67.6 | 69.0 | 68.9 | 31.7 | 55.3 | 38.5 | 51.3 | 25.5 | 53.4 | 50.0 | 64.1 | 32.8 |
| 10. | DY268946 | 46.9 | 45.0 | 57.6 | 35.6 | 44.7 | 43.8 | 44.2 | 32.7 | 43.2 | 38.9 | 44.6 | 24.4 | 45.8 | 45.4 | 43.5 | 34.2 |
| 11. | TA2544 | 33.4 | 36.1 | 34.6 | 31.1 | 36.1 | 35.7 | 36.5 | 41.8 | 29.6 | 41.3 | 35.3 | 30.2 | 35.4 | 33.8 | 35.1 | 45.9 |
| 12. | TA3392 | 63.1 | 77.0 | 52.2 | 36.8 | 76.7 | 76.1 | 75.2 | 33.9 | 56.2 | 36.2 | 52.2 | 25.6 | 54.3 | 51.6 | 64.5 | 33.0 |
| 13. | TA12416 | 29.7 | 33.3 | 32.1 | 31.3 | 33.3 | 33.3 | 34.1 | 56.2 | 27.5 | 48.0 | 33.7 | 30.2 | 33.3 | 31.2 | 32.6 | 56.3 |
| 14. | WO051050seqID77 | 50.0 | 54.6 | 58.1 | 31.5 | 54.3 | 54.0 | 52.5 | 33.3 | 47.2 | 36.7 | 54.2 | 27.7 | 54.3 | 56.0 | 53.4 | 34.7 |
| 15. | WO051050seqID1671 | 58.7 | 71.0 | 44.8 | 33.5 | 70.7 | 70.3 | 68.9 | 32.0 | 53.2 | 34.4 | 47.6 | 27.4 | 49.4 | 48.5 | 62.0 | 34.8 |
| 16. | TA55042 | 48.1 | 48.6 | 58.1 | 33.8 | 48.4 | 47.8 | 49.9 | 32.6 | 46.4 | 37.7 | 50.1 | 29.4 | 53.1 | 50.9 | 49.4 | 35.2 |
| 17. | TC207545 | | 64.7 | 56.0 | 37.4 | 64.4 | 65.1 | 65.6 | 30.9 | 77.6 | 37.8 | 52.6 | 23.9 | 55.6 | 52.0 | 61.8 | 32.0 |
| 18. | TA13791 | 71.6 | | 50.6 | 35.4 | 99.7 | 87.2 | 84.9 | 33.7 | 59.7 | 39.4 | 54.0 | 26.2 | 56.7 | 53.3 | 69.0 | 35.6 |
| 19. | CO123623 | 64.9 | 61.7 | | 36.8 | 50.5 | 49.5 | 49.2 | 30.9 | 52.2 | 39.3 | 51.1 | 25.4 | 53.2 | 50.3 | 47.7 | 31.5 |
| 20. | DT543504 | 52.6 | 54.9 | 50.0 | 35.7 | 34.8 | 36.1 | 34.0 | 34.0 | 36.3 | 34.2 | 31.0 | 36.1 | 37.1 | 35.7 | 31.9 | |
| 21. | TC60118 | 71.3 | 99.7 | 60.7 | 55.2 | | 86.8 | 84.6 | 33.7 | 59.4 | 39.1 | 53.7 | 26.2 | 56.4 | 53.0 | 68.7 | 35.6 |
| 22. | TC60119 | 71.1 | 91.1 | 58.6 | 53.6 | 90.8 | | 86.9 | 32.7 | 59.5 | 39.1 | 53.3 | 26.1 | 54.7 | 53.5 | 70.1 | 36.7 |
| 23. | TC61833 | 71.1 | 90.8 | 56.4 | 54.9 | 90.5 | 92.5 | | 33.5 | 59.3 | 37.7 | 52.6 | 26.5 | 55.9 | 53.3 | 71.1 | 36.4 |
| 24. | TC67603 | 38.6 | 42.9 | 40.0 | 41.2 | 42.6 | 42.2 | 42.2 | | 28.5 | 47.1 | 35.0 | 27.3 | 34.9 | 33.2 | 33.2 | 49.6 |
| 25. | TC229602 | 81.1 | 65.3 | 61.9 | 46.1 | 65.0 | 64.5 | 63.9 | 35.8 | | 38.2 | 47.7 | 22.5 | 50.5 | 50.7 | 58.2 | 29.0 |
| 26. | TC205173 | 49.0 | 51.0 | 49.6 | 49.9 | 50.7 | 51.9 | 51.6 | 56.4 | 45.7 | | 39.2 | 25.3 | 37.8 | 37.4 | 39.8 | 47.3 |
| 27. | TA1140 | 61.1 | 66.0 | 62.4 | 53.9 | 65.7 | 66.0 | 65.4 | 45.2 | 54.2 | 52.2 | | 27.1 | 84.2 | 66.0 | 51.2 | 35.8 |
| 28. | TC140470 | 33.5 | 37.8 | 32.8 | 43.9 | 37.6 | 37.4 | 37.8 | 42.8 | 29.7 | 36.4 | 38.0 | | 29.1 | 26.1 | 27.9 | 28.7 |
| 29. | TA3490_part | 63.1 | 68.6 | 63.1 | 52.6 | 68.3 | 66.4 | 66.6 | 44.7 | 57.2 | 49.6 | 87.3 | 37.4 | | 68.0 | 53.2 | 34.4 |
| 30. | CK293938 | 59.8 | 66.0 | 64.9 | 53.6 | 65.7 | 66.8 | 65.6 | 42.2 | 57.4 | 49.6 | 78.1 | 36.2 | 79.4 | | 51.5 | 34.2 |
| 31. | TC8633 | 69.9 | 80.9 | 59.3 | 54.9 | 80.5 | 81.6 | 82.3 | 44.3 | 63.2 | 51.3 | 67.3 | 38.5 | 68.9 | 67.5 | | 36.0 |
| 32. | TC7102 | 38.1 | 44.2 | 39.3 | 41.3 | 44.0 | 44.0 | 45.1 | 62.1 | 34.8 | 55.5 | 44.7 | 43.0 | 42.7 | 44.0 | 44.7 | |
| 33. | TC7103 | 42.9 | 49.1 | 41.6 | 45.5 | 48.8 | 49.1 | 48.3 | 65.8 | 40.1 | 62.5 | 48.8 | 41.0 | 47.5 | 47.0 | 46.5 | 72.9 |
| 34. | TC12771 | 59.7 | 66.0 | 65.8 | 54.9 | 65.7 | 65.8 | 64.6 | 43.1 | 55.7 | 50.7 | 78.1 | 37.4 | 78.5 | 98.0 | 67.5 | 44.5 |
| 35. | Os03g58330 | 59.2 | 63.7 | 62.9 | 51.3 | 63.4 | 63.5 | 60.3 | 43.6 | 56.1 | 50.1 | 64.7 | 36.8 | 67.0 | 66.6 | 66.9 | 42.7 |
| 36. | Os06g08500 | 40.3 | 43.3 | 39.0 | 43.3 | 43.3 | 45.2 | 47.4 | 46.4 | 37.1 | 51.2 | 47.7 | 36.2 | 44.4 | 42.5 | 42.5 | 49.2 |
| 37. | Os06g09370 | 33.1 | 38.9 | 36.2 | 40.8 | 39.1 | 37.4 | 38.1 | 41.4 | 28.7 | 36.6 | 36.4 | 81.5 | 37.2 | 38.7 | 38.3 | 43.9 |
| 38. | Os02g55250 | 38.1 | 41.5 | 39.0 | 43.5 | 41.3 | 41.3 | 42.2 | 56.0 | 35.1 | 50.1 | 42.0 | 45.3 | 44.0 | 41.5 | 44.0 | 60.5 |
| 39. | Os02g35660 | 32.3 | 37.4 | 34.0 | 39.7 | 37.2 | 36.3 | 35.9 | 44.3 | 29.6 | 36.5 | 37.4 | 49.8 | 36.5 | 35.9 | 35.9 | 44.1 |
| 40. | Os07g08440 | 58.4 | 63.7 | 65.9 | 51.0 | 63.4 | 62.8 | 63.9 | 41.0 | 55.3 | 49.6 | 63.4 | 35.6 | 64.5 | 67.6 | 66.6 | 41.8 |
| 41. | Os09g25040 | 33.9 | 38.3 | 35.7 | 37.7 | 38.1 | 38.1 | 38.7 | 54.5 | 31.1 | 47.9 | 38.7 | 42.5 | 36.3 | 36.3 | 37.5 | 58.5 |
| 42. | Pt_scaff_II.416 | 73.3 | 89.4 | 61.0 | 55.2 | 89.1 | 88.2 | 85.6 | 42.4 | 66.0 | 50.4 | 65.0 | 37.0 | 67.3 | 67.0 | 82.1 | 44.5 |
| 43. | Pt_scaff_70.65 | 56.5 | 63.4 | 66.2 | 50.8 | 63.1 | 63.7 | 63.7 | 43.3 | 52.3 | 50.7 | 63.7 | 38.7 | 63.4 | 65.6 | 63.1 | 44.5 |
| 44. | Pt_scaff_XIII.403 | 55.4 | 64.4 | 64.7 | 49.7 | 64.1 | 62.3 | 63.2 | 44.0 | 50.6 | 54.0 | 62.9 | 41.0 | 65.0 | 63.5 | 63.5 | 44.9 |
| 45. | Pt_scaff28.86 | 36.0 | 39.5 | 36.8 | 50.2 | 39.3 | 39.9 | 39.5 | 47.8 | 31.8 | 42.1 | 39.9 | 47.6 | 38.6 | 40.6 | 41.4 | 47.6 |
| 46. | Pt_TC63334 | 73.7 | 89.1 | 62.0 | 53.6 | 88.8 | 88.2 | 86.2 | 42.4 | 66.7 | 51.0 | 63.1 | 37.4 | 67.0 | 64.3 | 82.8 | 45.1 |
| 47. | TA14134 | 45.5 | 50.2 | 46.8 | 50.8 | 50.2 | 48.9 | 46.5 | 43.6 | 42.8 | 54.9 | 50.2 | 35.1 | 49.2 | 48.9 | 51.7 | 43.6 |
| 48. | TA5414 | 37.0 | 42.9 | 39.1 | 39.7 | 42.7 | 41.0 | 41.7 | 67.1 | 33.5 | 55.1 | 42.1 | 48.6 | 41.5 | 42.1 | 41.2 | 69.4 |
| 49. | TA3263 | 73.7 | 89.4 | 62.3 | 54.2 | 89.1 | 88.5 | 86.6 | 43.1 | 66.7 | 51.0 | 63.1 | 37.4 | 67.3 | 64.7 | 82.8 | 45.6 |
| 50. | TA2825 | 74.6 | 90.4 | 60.9 | 55.9 | 90.1 | 90.1 | 89.2 | 43.1 | 67.2 | 51.0 | 66.0 | 35.8 | 67.2 | 66.2 | 83.4 | 46.0 |
| 51. | TA1616 | 57.7 | 66.6 | 68.4 | 54.0 | 66.3 | 65.0 | 65.0 | 42.9 | 55.2 | 51.0 | 65.6 | 38.3 | 63.2 | 65.6 | 66.0 | 47.2 |
| 52. | TA21665 | 60.1 | 66.0 | 62.5 | 52.3 | 65.7 | 66.4 | 66.6 | 42.9 | 54.4 | 51.3 | 73.5 | 36.6 | 76.4 | 84.8 | 64.2 | 43.8 |
| 53. | TC172581 | 59.5 | 67.1 | 62.2 | 54.2 | 66.8 | 67.4 | 65.6 | 42.2 | 55.6 | 50.7 | 76.1 | 38.5 | 76.0 | 92.1 | 66.1 | 43.8 |
| 54. | AK247217 | 70.5 | 82.8 | 60.6 | 52.6 | 82.5 | 84.2 | 84.3 | 43.3 | 63.9 | 49.6 | 67.6 | 38.0 | 67.9 | 69.2 | 95.0 | 42.7 |
| 55. | TC104646 | 63.5 | 63.0 | 65.3 | 49.7 | 62.7 | 61.5 | 61.6 | 43.1 | 59.2 | 49.3 | 62.1 | 35.1 | 66.6 | 67.6 | 62.9 | 40.2 |
| 56. | DV982110 | 56.9 | 58.1 | 62.0 | 56.2 | 57.8 | 57.9 | 57.7 | 44.5 | 56.2 | 58.2 | 58.5 | 35.3 | 57.9 | 55.7 | 55.6 | 43.6 |
| 57. | WO051050seqID516 | 37.8 | 43.2 | 39.5 | 41.9 | 43.0 | 43.6 | 43.6 | 50.5 | 35.0 | 46.0 | 41.9 | 45.9 | 41.3 | 41.9 | 43.2 | 52.9 |
| 58. | TC68930 | 48.3 | 50.2 | 45.0 | 50.5 | 50.5 | 48.0 | 49.5 | 45.2 | 43.5 | 57.9 | 50.2 | 37.0 | 48.9 | 47.1 | 47.4 | 45.1 |
| 59. | TA30646 | 70.2 | 83.5 | 60.6 | 54.2 | 83.2 | 84.2 | 84.3 | 42.9 | 63.9 | 49.6 | 68.3 | 37.6 | 67.5 | 68.5 | 95.4 | 42.2 |
| 60. | TA28621 | 59.5 | 68.1 | 63.5 | 54.2 | 67.8 | 68.4 | 66.6 | 42.4 | 54.9 | 51.3 | 77.1 | 38.7 | 76.6 | 93.8 | 66.8 | 43.6 |
| 61. | TA34455 | 37.1 | 42.5 | 36.9 | 41.2 | 42.3 | 43.4 | 41.8 | 63.1 | 34.2 | 53.0 | 44.5 | 45.3 | 42.3 | 44.3 | 42.7 | 83.2 |
| 62. | TA37666 | 42.1 | 49.0 | 45.3 | 44.5 | 48.7 | 48.7 | 47.4 | 63.7 | 39.8 | 61.0 | 49.5 | 42.4 | 48.2 | 49.5 | 49.5 | 71.1 |
| 63. | TC253044 | 53.4 | 53.1 | 52.8 | 59.8 | 52.8 | 54.9 | 50.8 | 40.3 | 47.6 | 48.4 | 50.3 | 56.5 | 55.9 | 54.7 | 54.0 | 41.3 |
| 64. | TabHLH11 | 61.9 | 62.7 | 66.9 | 50.3 | 62.4 | 62.2 | 61.6 | 40.5 | 58.7 | 50.4 | 63.1 | 35.8 | 66.2 | 66.9 | 65.6 | 41.8 |
| 65. | TA46156 | 74.4 | 85.5 | 64.4 | 56.2 | 85.1 | 85.2 | 83.3 | 44.7 | 67.8 | 53.4 | 67.3 | 38.0 | 70.0 | 70.9 | 81.1 | 43.3 |
| 66. | GSVIVT00017237001 | 40.9 | 45.9 | 39.7 | 43.8 | 45.9 | 45.0 | 45.9 | 64.9 | 35.9 | 61.2 | 44.0 | 42.6 | 42.1 | 42.8 | 46.2 | 68.2 |
| 67. | TA46194 | 64.5 | 73.5 | 66.8 | 53.4 | 73.2 | 72.5 | 72.2 | 44.3 | 57.8 | 54.3 | 70.6 | 38.7 | 72.8 | 74.8 | 73.2 | 44.9 |
| 68. | GSVIVT00016367001 | 32.8 | 37.1 | 34.6 | 45.4 | 36.9 | 36.5 | 38.1 | 44.3 | 29.9 | 41.6 | 39.0 | 50.3 | 36.9 | 35.3 | 38.8 | 45.4 |
| 69. | TA139285 | 60.7 | 61.1 | 66.0 | 48.0 | 60.7 | 61.5 | 61.0 | 40.7 | 56.1 | 49.0 | 64.7 | 35.6 | 66.2 | 68.9 | 64.2 | 41.1 |
| 70. | TA126400 | 62.5 | 63.0 | 63.2 | 50.0 | 62.7 | 61.8 | 63.6 | 42.6 | 57.9 | 49.3 | 62.4 | 34.9 | 65.9 | 66.9 | 62.3 | 40.0 |
| | | 33 | 34 | 35 | 36 | 37 | 38 | 39 | 40 | 41 | 42 | 43 | 44 | 45 | 46 | 47 | 48 |
| 1. | TC3698 | 36.2 | 53.3 | 56.0 | 31.1 | 26.5 | 32.4 | 26.5 | 56.9 | 30.0 | 50.8 | 48.7 | 47.8 | 28.7 | 50.8 | 31.8 | 29.7 |
| 2. | AT1G03040 | 35.4 | 48.3 | 51.4 | 30.9 | 25.8 | 34.1 | 27.9 | 49.8 | 29.5 | 65.7 | 48.6 | 47.5 | 29.9 | 66.7 | 31.1 | 31.1 |
| 3. | AT4G02590 | 35.4 | 50.8 | 52.7 | 32.8 | 27.8 | 33.6 | 28.7 | 51.2 | 31.7 | 71.8 | 52.1 | 49.3 | 30.9 | 72.8 | 31.6 | 33.6 |
| 4. | AT2G24260 | 21.8 | 16.3 | 16.7 | 17.5 | 15.5 | 21.2 | 16.4 | 16.4 | 21.4 | 16.7 | 16.6 | 15.5 | 18.1 | 17.0 | 18.9 | 23.0 |
| 5. | AT4G30980 | 44.3 | 35.6 | 39.8 | 33.9 | 25.5 | 36.2 | 28.6 | 37.6 | 33.8 | 35.5 | 36.1 | 33.6 | 29.6 | 36.4 | 34.9 | 41.6 |
| 6. | AT5G58010 | 39.7 | 36.4 | 37.4 | 37.7 | 26.9 | 36.4 | 26.1 | 37.4 | 31.9 | 34.6 | 34.2 | 34.1 | 31.3 | 35.8 | 36.3 | 35.6 |
| 7. | TC15501 | 37.6 | 53.0 | 52.5 | 32.7 | 29.4 | 35.0 | 30.7 | 52.0 | 33.5 | 59.7 | 55.6 | 55.5 | 30.7 | 62.0 | 30.8 | 35.2 |
| 8. | TC19278 | 20.2 | 18.6 | 19.5 | 20.8 | 15.6 | 19.1 | 17.9 | 19.8 | 17.0 | 19.7 | 17.0 | 18.0 | 22.7 | 19.7 | 29.4 | 19.0 |
| 9. | TC10015_part | 35.7 | 50.6 | 51.8 | 32.9 | 26.0 | 32.9 | 26.7 | 52.8 | 30.6 | 67.5 | 50.4 | 48.7 | 27.4 | 68.5 | 30.9 | 31.0 |
| 10. | DY268946 | 33.5 | 45.1 | 46.9 | 31.6 | 26.5 | 32.9 | 26.6 | 47.9 | 31.5 | 42.9 | 54.2 | 51.6 | 29.6 | 44.0 | 36.8 | 33.1 |
| 11. | TA2544 | 42.6 | 35.0 | 35.1 | 39.3 | 31.1 | 42.5 | 32.1 | 35.3 | 43.3 | 36.2 | 36.9 | 36.4 | 33.1 | 36.4 | 32.5 | 45.2 |
| 12. | TA3392 | 35.2 | 52.1 | 53.0 | 30.4 | 28.9 | 32.7 | 26.2 | 51.5 | 30.8 | 76.3 | 49.3 | 48.6 | 28.3 | 78.0 | 30.2 | 31.0 |
| 13. | TA12416 | 55.6 | 31.8 | 32.2 | 36.9 | 28.7 | 45.2 | 30.6 | 31.4 | 47.5 | 32.7 | 32.7 | 33.3 | 32.5 | 33.5 | 31.2 | 98.3 |
| 14. | WO051050seqID77 | 35.6 | 55.9 | 52.0 | 31.9 | 28.8 | 34.5 | 27.4 | 51.6 | 32.3 | 54.0 | 63.0 | 61.3 | 29.3 | 54.6 | 32.1 | 32.0 |
| 15. | WO051050seqID1671 | 35.0 | 48.7 | 48.7 | 32.1 | 28.7 | 33.1 | 29.3 | 48.6 | 33.4 | 70.4 | 50.5 | 50.7 | 30.9 | 70.3 | 28.9 | 32.9 |
| 16. | TA55042 | 36.8 | 50.3 | 51.3 | 33.9 | 32.2 | 36.3 | 27.3 | 51.0 | 31.1 | 47.8 | 61.3 | 60.1 | 30.4 | 48.1 | 30.9 | 33.3 |
| 17. | TC207545 | 32.9 | 53.0 | 54.1 | 28.6 | 23.9 | 31.3 | 24.9 | 53.2 | 28.8 | 67.3 | 48.3 | 44.8 | 27.2 | 68.3 | 32.8 | 30.2 |
| 18. | TA13791 | 38.5 | 53.3 | 54.6 | 33.2 | 27.1 | 33.8 | 28.2 | 51.7 | 32.5 | 80.7 | 50.1 | 50.7 | 30.7 | 82.0 | 32.6 | 33.3 |
| 19. | CO123623 | 33.6 | 52.0 | 50.6 | 31.1 | 29.0 | 30.1 | 27.3 | 50.9 | 29.6 | 50.3 | 58.4 | 56.5 | 26.2 | 51.5 | 32.1 | 33.1 |
| 20. | DT543504 | 33.4 | 38.1 | 34.5 | 31.8 | 28.8 | 32.3 | 30.8 | 32.5 | 29.0 | 33.3 | 33.3 | 32.7 | 40.8 | 32.9 | 36.1 | 30.8 |
| 21. | TC60118 | 38.5 | 53.0 | 54.3 | 33.2 | 27.5 | 33.6 | 28.2 | 51.4 | 32.3 | 80.4 | 49.9 | 50.4 | 30.7 | 81.7 | 32.6 | 33.3 |
| 22. | TC60119 | 37.3 | 54.4 | 53.1 | 33.1 | 27.0 | 34.2 | 28.2 | 51.1 | 31.4 | 80.5 | 49.9 | 48.6 | 30.1 | 81.8 | 31.2 | 33.6 |
| 23. | TC61833 | 36.8 | 53.9 | 51.1 | 34.5 | 25.4 | 34.7 | 27.4 | 52.0 | 31.2 | 78.9 | 49.1 | 48.4 | 30.1 | 80.5 | 30.2 | 34.7 |
| 24. | TC67603 | 52.5 | 33.7 | 34.3 | 35.6 | 28.3 | 40.6 | 30.7 | 32.6 | 43.3 | 33.3 | 33.2 | 32.0 | 33.3 | 34.0 | 31.5 | 56.8 |
| 25. | TC229602 | 32.3 | 50.0 | 50.8 | 28.2 | 21.3 | 28.4 | 22.7 | 49.3 | 26.2 | 61.0 | 43.8 | 41.6 | 25.1 | 62.3 | 32.9 | 27.7 |
| 26. | TC205173 | 53.1 | 38.0 | 38.7 | 40.3 | 26.6 | 41.2 | 27.9 | 38.6 | 41.4 | 38.3 | 36.5 | 36.4 | 30.9 | 38.3 | 36.8 | 47.9 |
| 27. | TA1140 | 37.5 | 67.0 | 52.5 | 33.3 | 27.2 | 31.8 | 28.2 | 52.1 | 31.2 | 54.7 | 54.0 | 50.8 | 27.7 | 52.7 | 31.9 | 34.3 |
| 28. | TC140470 | 27.7 | 27.0 | 26.6 | 24.4 | 71.1 | 28.1 | 35.1 | 26.1 | 28.2 | 26.2 | 28.1 | 28.7 | 31.9 | 25.2 | 24.0 | 31.2 |
| 29. | TA3490_part | 36.5 | 68.5 | 54.0 | 32.7 | 28.3 | 33.3 | 27.6 | 53.7 | 30.3 | 54.9 | 53.0 | 52.6 | 29.0 | 54.3 | 31.7 | 33.3 |
| 30. | CK293938 | 37.5 | 96.3 | 53.8 | 32.4 | 28.0 | 33.9 | 27.5 | 53.5 | 30.0 | 53.0 | 52.7 | 50.9 | 28.6 | 52.0 | 30.9 | 31.2 |
| 31. | TC8633 | 34.9 | 52.5 | 53.8 | 33.0 | 29.2 | 33.6 | 26.9 | 52.6 | 31.4 | 69.9 | 52.7 | 50.7 | 30.5 | 71.2 | 34.0 | 32.1 |
| 32. | TC7102 | 64.6 | 34.5 | 35.9 | 37.5 | 28.8 | 47.3 | 32.6 | 34.1 | 48.4 | 35.3 | 33.5 | 34.4 | 32.9 | 35.7 | 32.8 | 56.1 |
| 33. | TC7103 | | 38.2 | 37.8 | 41.1 | 28.9 | 46.2 | 29.6 | 38.3 | 44.7 | 34.3 | 34.8 | 36.7 | 32.9 | 35.7 | 34.1 | 55.3 |
| 34. | TC12771 | 48.1 | | 54.6 | 32.2 | 28.6 | 34.9 | 26.9 | 54.7 | 30.0 | 53.6 | 53.0 | 50.6 | 28.8 | 51.7 | 31.4 | 31.9 |
| 35. | Os03g58330 | 46.0 | 66.1 | | 36.6 | 27.1 | 35.3 | 28.0 | 74.9 | 32.3 | 54.3 | 50.1 | 49.0 | 27.4 | 51.2 | 33.5 | 31.8 |
| 36. | Os06g08500 | 55.6 | 45.0 | 47.4 | | 24.0 | 46.8 | 29.1 | 36.2 | 38.0 | 32.9 | 32.1 | 31.3 | 27.7 | 34.3 | 32.3 | 37.9 |
| 37. | Os06g09370 | 41.2 | 38.5 | 35.8 | 37.4 | | 28.6 | 34.3 | 26.6 | 28.6 | 27.6 | 31.2 | 30.4 | 32.1 | 27.9 | 23.9 | 27.8 |
| 38. | Os02g55250 | 59.0 | 43.5 | 42.2 | 59.2 | 46.4 | | 31.8 | 35.3 | 46.4 | 33.4 | 34.2 | 34.4 | 32.8 | 33.7 | 33.5 | 45.8 |
| 39. | Os02g35660 | 40.3 | 36.5 | 36.1 | 36.6 | 47.9 | 45.6 | | 25.7 | 30.4 | 26.4 | 29.1 | 27.2 | 31.9 | 26.1 | 25.7 | 30.5 |
| 40. | Os07g08440 | 45.7 | 68.1 | 82.0 | 46.0 | 35.8 | 41.7 | 34.0 | 31.4 | 53.4 | 50.0 | 47.8 | 27.7 | 52.3 | 31.7 | 31.7 | |
| 41. | Os09g25040 | 54.9 | 37.1 | 37.3 | 47.3 | 43.7 | 56.3 | 44.8 | 37.5 | | 30.6 | 31.2 | 31.2 | 31.1 | 30.9 | 29.1 | 47.7 |
| 42. | Pt_scaff_II.416 | 48.3 | 66.7 | 63.3 | 44.7 | 39.5 | 43.3 | 36.6 | 64.3 | 38.3 | | 50.3 | 49.6 | 29.1 | 93.7 | 30.5 | 33.0 |
| 43. | Pt_scaff_70.65 | 47.0 | 65.9 | 60.7 | 44.7 | 42.9 | 44.2 | 37.8 | 60.7 | 38.1 | 63.1 | | 88.4 | 29.5 | 50.0 | 31.0 | 32.4 |
| 44. | Pt_scaff_XIII.403 | 47.5 | 63.2 | 59.9 | 43.6 | 41.8 | 44.9 | 38.2 | 59.0 | 38.5 | 63.2 | 90.7 | | 27.9 | 49.6 | 28.2 | 32.3 |
| 45. | Pt_scaff28.86 | 45.8 | 40.1 | 36.4 | 41.2 | 49.6 | 47.6 | 45.6 | 35.3 | 46.1 | 39.3 | 40.4 | 40.6 | | 29.8 | 31.8 | 33.2 |
| 46. | Pt_TC63334 | 48.8 | 64.7 | 64.0 | 44.1 | 38.3 | 43.5 | 35.3 | 65.0 | 38.1 | 95.3 | 63.4 | 61.4 | 40.4 | | 30.8 | 33.6 |
| 47. | TA14134 | 45.5 | 49.8 | 47.7 | 46.6 | 36.8 | 44.7 | 36.8 | 46.8 | 38.1 | 48.3 | 49.2 | 47.6 | 42.1 | 49.2 | | 30.1 |
| 48. | TA5414 | 63.9 | 40.8 | 38.5 | 47.2 | 44.8 | 57.1 | 45.4 | 39.3 | 60.5 | 42.1 | 41.0 | 42.1 | 47.9 | 42.7 | 39.7 | |
| 49. | TA3263 | 49.1 | 65.0 | 64.0 | 44.4 | 38.7 | 43.8 | 35.1 | 64.3 | 38.7 | 95.0 | 63.4 | 61.4 | 41.0 | 99.0 | 49.8 | 42.1 |
| 50. | TA2825 | 49.4 | 66.2 | 63.2 | 45.0 | 37.9 | 43.3 | 36.6 | 65.2 | 39.1 | 93.3 | 64.7 | 62.9 | 39.0 | 93.0 | 50.2 | 41.2 |
| 51. | TA1616 | 47.8 | 66.6 | 63.2 | 48.5 | 40.8 | 46.3 | 36.3 | 66.0 | 39.5 | 65.6 | 83.7 | 80.5 | 41.2 | 64.1 | 50.3 | 40.6 |
| 52. | TA21665 | 48.6 | 84.9 | 65.9 | 44.7 | 35.6 | 43.3 | 37.2 | 65.9 | 37.7 | 67.0 | 63.7 | 63.2 | 37.7 | 66.7 | 48.0 | 41.2 |
| 53. | TC172581 | 48.3 | 92.8 | 65.8 | 44.4 | 38.5 | 41.5 | 36.6 | 64.5 | 38.1 | 68.4 | 64.7 | 63.5 | 39.9 | 66.8 | 49.8 | 42.1 |
| 54. | AK247217 | 47.3 | 67.5 | 64.6 | 43.6 | 37.9 | 44.2 | 35.9 | 64.6 | 37.9 | 83.8 | 65.3 | 63.8 | 42.8 | 84.4 | 50.8 | 41.9 |
| 55. | TC104646 | 44.2 | 67.1 | 77.6 | 45.2 | 35.8 | 40.1 | 34.0 | 85.0 | 37.1 | 63.3 | 57.4 | 57.8 | 36.0 | 63.7 | 44.6 | 38.9 |
| 56. | DV982110 | 50.4 | 54.4 | 57.5 | 46.0 | 35.6 | 43.5 | 34.9 | 59.0 | 38.9 | 58.3 | 54.1 | 50.3 | 40.1 | 58.3 | 51.1 | 41.7 |
| 57. | WO051050seqID516 | 48.8 | 42.1 | 42.5 | 44.3 | 44.6 | 51.6 | 42.6 | 41.9 | 52.3 | 44.7 | 44.5 | 44.7 | 49.5 | 42.5 | 42.8 | 51.7 |
| 58. | TC68930 | 50.4 | 47.1 | 49.8 | 47.7 | 37.0 | 45.8 | 35.9 | 46.8 | 40.9 | 49.8 | 48.0 | 46.1 | 45.0 | 50.8 | 63.7 | 40.4 |
| 59. | TA30646 | 46.8 | 68.5 | 62.3 | 43.1 | 39.3 | 45.6 | 36.3 | 65.9 | 37.9 | 84.1 | 65.3 | 63.8 | 42.8 | 84.8 | 49.8 | 41.7 |
| 60. | TA28621 | 48.6 | 94.4 | 66.8 | 45.0 | 38.5 | 41.5 | 36.5 | 64.1 | 37.7 | 68.8 | 65.3 | 63.8 | 40.4 | 67.4 | 48.3 | 41.2 |
| 61. | TA34455 | 71.4 | 43.6 | 44.3 | 47.4 | 44.4 | 60.0 | 43.1 | 41.6 | 59.5 | 42.5 | 44.7 | 46.5 | 46.1 | 41.2 | 42.7 | 66.9 |
| 62. | TA37666 | 88.9 | 50.3 | 48.2 | 54.7 | 41.8 | 55.8 | 38.5 | 47.6 | 52.3 | 49.7 | 51.0 | 49.2 | 43.9 | 50.0 | 47.1 | 63.5 |
| 63. | TC253044 | 45.7 | 55.7 | 52.7 | 42.5 | 50.0 | 40.6 | 38.4 | 52.9 | 36.5 | 54.0 | 49.8 | 50.3 | 41.4 | 53.3 | 46.8 | 39.1 |
| 64. | TabHLH11 | 45.2 | 67.8 | 86.4 | 43.3 | 36.8 | 41.0 | 36.3 | 80.5 | 36.5 | 62.3 | 58.3 | 59.0 | 36.4 | 63.0 | 45.5 | 38.2 |
| 65. | TA46156 | 48.3 | 70.8 | 66.0 | 44.1 | 37.0 | 42.4 | 35.7 | 66.2 | 37.5 | 85.0 | 64.7 | 61.4 | 39.0 | 85.3 | 50.5 | 40.2 |
| 66. | GSVIVT00017237001 | 65.1 | 43.8 | 43.3 | 52.4 | 43.1 | 58.5 | 42.4 | 44.7 | 56.5 | 44.3 | 45.9 | 48.1 | 47.6 | 45.0 | 44.0 | 69.2 |
| 67. | TA46194 | 49.6 | 75.1 | 68.4 | 45.8 | 39.1 | 45.1 | 37.6 | 68.7 | 39.7 | 73.8 | 70.4 | 69.2 | 40.1 | 73.5 | 49.5 | 42.1 |
| 68. | GSVIVT00016367001 | 44.3 | 35.5 | 36.5 | 39.6 | 50.5 | 46.2 | 49.4 | 35.9 | 45.9 | 38.8 | 40.6 | 41.2 | 63.9 | 36.7 | 39.0 | 45.6 |
| 69. | TA139285 | 46.8 | 68.1 | 90.5 | 45.5 | 38.1 | 40.4 | 34.0 | 84.0 | 37.7 | 61.7 | 58.3 | 58.4 | 38.4 | 61.7 | 47.1 | 38.2 |
| 70. | TA126400 | 45.2 | 66.1 | 76.2 | 44.1 | 35.6 | 40.8 | 35.3 | 82.9 | 36.7 | 64.0 | 58.0 | 55.7 | 36.4 | 64.7 | 45.8 | 41.5 |

| | | 49 | 50 | 51 | 52 | 53 | 54 | 55 | 56 | 57 | 58 | 59 | 60 | 61 | 62 | 63 |
|---|---|---|---|---|---|---|---|---|---|---|---|---|---|---|---|---|
| 1. | TC3698 | 51.4 | 54.0 | 50.6 | 52.3 | 50.2 | 54.4 | 58.0 | 45.1 | 33.3 | 33.4 | 54.7 | 50.8 | 31.4 | 35.3 | 37.5 |
| 2. | AT1G03040 | 66.7 | 70.0 | 52.4 | 46.8 | 49.2 | 66.5 | 50.6 | 40.2 | 33.0 | 31.8 | 67.0 | 49.2 | 32.8 | 36.4 | 37.3 |
| 3. | AT4G02590 | 73.1 | 75.2 | 54.0 | 49.4 | 53.2 | 70.2 | 53.4 | 43.1 | 33.3 | 32.5 | 69.9 | 52.7 | 33.4 | 38.9 | 37.0 |
| 4. | AT2G24260 | 17.0 | 16.4 | 17.3 | 15.6 | 15.4 | 17.0 | 16.6 | 18.5 | 20.8 | 19.9 | 16.5 | 15.7 | 20.6 | 21.8 | 14.8 |
| 5. | AT4G30980 | 36.8 | 37.5 | 36.4 | 36.1 | 36.9 | 36.4 | 41.0 | 42.2 | 34.9 | 36.4 | 36.6 | 35.7 | 41.3 | 43.2 | 35.3 |
| 6. | AT5G58010 | 35.8 | 35.1 | 33.9 | 36.2 | 35.1 | 35.4 | 38.3 | 46.5 | 33.5 | 39.9 | 36.2 | 34.7 | 36.6 | 40.5 | 36.6 |
| 7. | TC15501 | 61.5 | 61.2 | 59.3 | 51.0 | 51.4 | 61.1 | 51.6 | 41.5 | 36.4 | 30.0 | 60.3 | 51.7 | 37.0 | 37.5 | 34.0 |
| 8. | TC19278 | 20.5 | 20.3 | 18.3 | 18.8 | 18.4 | 19.8 | 21.0 | 25.1 | 20.2 | 30.4 | 20.1 | 18.4 | 17.0 | 20.6 | 24.1 |
| 9. | TC10015_part | 68.8 | 70.7 | 53.3 | 48.7 | 50.0 | 65.9 | 51.8 | 42.4 | 32.8 | 31.8 | 66.2 | 50.0 | 32.7 | 35.1 | 36.8 |
| 10. | DY268946 | 44.0 | 43.7 | 57.3 | 42.4 | 43.9 | 41.7 | 47.0 | 40.7 | 35.5 | 35.9 | 44.5 | 44.9 | 34.0 | 34.6 | 33.1 |
| 11. | TA2544 | 36.6 | 36.1 | 37.0 | 33.5 | 35.9 | 35.7 | 35.1 | 37.6 | 40.8 | 34.2 | 34.5 | 36.1 | 46.6 | 45.3 | 31.7 |
| 12. | TA3392 | 78.0 | 76.7 | 52.6 | 53.2 | 52.5 | 68.3 | 51.8 | 42.8 | 33.4 | 31.3 | 68.0 | 53.2 | 34.1 | 36.5 | 37.5 |
| 13. | TA12416 | 32.8 | 33.5 | 33.5 | 30.3 | 32.2 | 32.6 | 32.9 | 35.2 | 37.7 | 31.7 | 32.2 | 32.2 | 53.7 | 52.9 | 28.8 |
| 14. | WO051050seqID77 | 54.6 | 54.3 | 63.7 | 54.0 | 54.0 | 55.3 | 52.0 | 41.4 | 34.8 | 31.2 | 55.0 | 53.5 | 35.8 | 33.9 | 36.7 |
| 15. | WO051050seqID1671 | 70.6 | 73.4 | 51.6 | 46.5 | 48.3 | 65.7 | 48.6 | 38.5 | 33.5 | 29.4 | 66.0 | 48.6 | 33.8 | 34.8 | 33.8 |
| 16. | TA55042 | 48.1 | 50.0 | 62.5 | 47.4 | 50.3 | 49.2 | 51.5 | 40.4 | 31.6 | 33.0 | 49.5 | 50.9 | 35.3 | 36.8 | 35.1 |
| 17. | TC207545 | 68.7 | 69.8 | 48.5 | 50.7 | 51.6 | 64.1 | 56.7 | 49.3 | 31.8 | 35.2 | 64.4 | 51.3 | 29.6 | 32.8 | 39.7 |
| 18. | TA13791 | 82.7 | 82.1 | 54.9 | 53.4 | 54.2 | 71.8 | 54.9 | 43.3 | 35.4 | 32.8 | 72.4 | 54.2 | 36.0 | 38.0 | 36.3 |
| 19. | CO123623 | 51.5 | 48.1 | 61.3 | 47.6 | 48.1 | 45.8 | 53.4 | 47.8 | 32.2 | 33.1 | 46.1 | 49.7 | 29.8 | 33.3 | 36.7 |
| 20. | DT543504 | 33.5 | 35.1 | 33.1 | 35.0 | 36.4 | 34.1 | 34.6 | 41.2 | 31.0 | 37.2 | 35.3 | 37.2 | 32.0 | 33.9 | 41.4 |
| 21. | TC60118 | 82.4 | 81.8 | 54.7 | 53.1 | 53.9 | 71.5 | 54.6 | 43.0 | 35.2 | 32.3 | 72.1 | 53.9 | 36.0 | 38.0 | 36.3 |
| 22. | TC60119 | 82.4 | 82.8 | 53.3 | 53.8 | 54.1 | 73.5 | 51.7 | 42.9 | 35.1 | 32.4 | 73.8 | 55.0 | 34.8 | 37.5 | 36.4 |
| 23. | TC61833 | 81.2 | 81.6 | 53.3 | 53.1 | 55.0 | 74.3 | 52.3 | 43.2 | 35.2 | 33.3 | 74.3 | 54.9 | 34.0 | 36.7 | 34.1 |
| 24. | TC67603 | 33.9 | 32.8 | 34.2 | 32.5 | 33.0 | 32.7 | 33.9 | 37.6 | 36.3 | 33.2 | 32.5 | 33.6 | 46.9 | 51.7 | 30.2 |
| 25. | TC229602 | 62.7 | 64.2 | 47.9 | 47.0 | 49.0 | 59.8 | 52.5 | 48.2 | 29.4 | 34.5 | 60.1 | 49.0 | 27.7 | 31.3 | 34.7 |
| 26. | TC205173 | 38.3 | 39.6 | 36.5 | 37.0 | 38.1 | 38.2 | 38.2 | 48.5 | 36.9 | 40.7 | 38.0 | 37.3 | 42.1 | 48.7 | 35.1 |
| 27. | TA1140 | 52.7 | 52.9 | 53.7 | 61.7 | 64.3 | 55.4 | 52.8 | 41.1 | 31.4 | 32.8 | 54.0 | 64.9 | 34.5 | 37.4 | 36.7 |
| 28. | TC140470 | 25.3 | 24.9 | 27.4 | 27.6 | 27.4 | 29.0 | 26.1 | 27.3 | 27.7 | 25.0 | 28.6 | 27.4 | 30.3 | 28.1 | 55.1 |
| 29. | TA3490_part | 54.9 | 55.0 | 53.7 | 66.0 | 67.0 | 55.5 | 56.8 | 45.3 | 32.3 | 33.6 | 55.5 | 67.3 | 33.6 | 36.7 | 36.5 |
| 30. | CK293938 | 52.6 | 54.0 | 54.1 | 76.4 | 87.9 | 53.3 | 56.8 | 41.2 | 32.7 | 32.7 | 53.5 | 88.9 | 34.3 | 37.7 | 36.6 |
| 31. | TC8633 | 71.5 | 72.4 | 52.6 | 51.5 | 51.9 | 90.8 | 52.7 | 43.9 | 35.0 | 31.9 | 91.1 | 51.9 | 33.7 | 36.8 | 35.2 |
| 32. | TC7102 | 35.7 | 36.7 | 36.8 | 33.2 | 35.6 | 35.7 | 34.3 | 36.2 | 38.0 | 33.4 | 35.2 | 35.3 | 71.8 | 63.0 | 31.4 |
| 33. | TC7103 | 36.2 | 37.2 | 37.7 | 36.6 | 37.8 | 36.2 | 37.0 | 41.0 | 37.6 | 37.0 | 36.0 | 38.5 | 62.4 | 83.3 | 33.6 |
| 34. | TC12771 | 52.3 | 54.0 | 54.7 | 77.7 | 89.2 | 54.1 | 57.4 | 40.9 | 32.1 | 33.1 | 53.8 | 90.5 | 34.6 | 38.1 | 36.6 |
| 35. | Os03g58330 | 51.2 | 55.0 | 52.8 | 51.1 | 52.1 | 53.6 | 72.9 | 44.2 | 34.1 | 34.6 | 54.0 | 52.7 | 36.6 | 37.6 | 34.9 |
| 36. | Os06g08500 | 34.6 | 33.9 | 34.5 | 29.6 | 33.1 | 33.1 | 33.3 | 36.6 | 32.8 | 32.0 | 32.8 | 32.7 | 39.0 | 40.0 | 30.1 |
| 37. | Os06g09370 | 28.1 | 26.7 | 30.1 | 26.3 | 28.6 | 28.5 | 27.4 | 28.2 | 27.5 | 25.4 | 28.4 | 27.6 | 30.3 | 28.4 | 45.0 |
| 38. | Os02g55250 | 34.7 | 34.1 | 35.8 | 33.3 | 34.2 | 33.5 | 34.0 | 36.1 | 36.8 | 34.3 | 34.6 | 34.0 | 46.1 | 44.2 | 31.3 |
| 39. | Os02g35660 | 26.4 | 28.2 | 27.7 | 25.5 | 27.8 | 27.3 | 26.5 | 27.9 | 29.1 | 26.6 | 27.6 | 28.1 | 31.3 | 29.8 | 29.5 |
| 40. | Os07g08440 | 52.3 | 56.2 | 55.8 | 51.9 | 50.8 | 51.4 | 81.3 | 45.6 | 33.6 | 31.9 | 52.6 | 50.8 | 33.6 | 36.3 | 35.3 |
| 41. | Os09g25040 | 31.7 | 31.5 | 31.6 | 29.4 | 30.5 | 31.7 | 31.1 | 32.5 | 37.2 | 31.3 | 31.5 | 30.4 | 45.6 | 43.6 | 27.9 |
| 42. | Pt_scaff_II.416 | 93.0 | 88.9 | 52.1 | 52.5 | 54.9 | 72.7 | 53.4 | 44.4 | 36.5 | 32.4 | 73.0 | 54.5 | 34.1 | 35.6 | 35.5 |
| 43. | Pt_scaff_70.65 | 49.7 | 51.6 | 73.2 | 51.5 | 51.7 | 52.3 | 49.4 | 42.3 | 34.6 | 31.6 | 52.0 | 52.0 | 34.1 | 37.6 | 35.0 |
| 44. | Pt_scaff_XIII.403 | 49.3 | 49.6 | 71.3 | 49.9 | 50.4 | 50.6 | 48.8 | 40.0 | 34.8 | 30.5 | 50.6 | 51.3 | 34.7 | 36.5 | 34.2 |
| 45. | Pt_scaff28.86 | 30.3 | 28.9 | 29.8 | 28.7 | 27.9 | 30.1 | 27.6 | 31.1 | 33.6 | 32.2 | 30.1 | 28.5 | 32.2 | 32.3 | 31.2 |
| 46. | Pt_TC63334 | 98.7 | 89.2 | 52.3 | 52.5 | 53.9 | 74.0 | 53.7 | 44.6 | 35.2 | 33.1 | 74.3 | 53.9 | 33.9 | 37.2 | 34.8 |
| 47. | TA14134 | 30.8 | 31.4 | 31.4 | 29.6 | 30.5 | 33.2 | 31.4 | 39.1 | 33.7 | 49.4 | 33.4 | 30.0 | 30.4 | 35.1 | 32.5 |
| 48. | TA5414 | 32.7 | 33.8 | 32.4 | 30.3 | 32.5 | 32.4 | 31.9 | 35.3 | 38.1 | 30.2 | 31.8 | 32.5 | 52.7 | 53.3 | 29.2 |
| 49. | TA3263 | | 89.2 | 52.6 | 53.1 | 54.5 | 74.3 | 54.3 | 44.9 | 35.8 | 33.6 | 74.6 | 54.5 | 33.8 | 37.7 | 34.8 |
| 50. | TA2825 | 93.3 | | 53.6 | 53.6 | 54.9 | 76.3 | 54.0 | 44.8 | 35.0 | 32.0 | 76.3 | 54.9 | 34.6 | 35.8 | 35.6 |
| 51. | TA1616 | 64.1 | 66.3 | | 51.1 | 52.4 | 54.1 | 54.8 | 42.5 | 35.7 | 32.1 | 54.1 | 53.6 | 35.0 | 36.8 | 34.7 |
| 52. | TA21665 | 67.0 | 66.6 | 65.0 | | 75.2 | 52.3 | 53.8 | 43.0 | 32.0 | 32.5 | 52.0 | 76.5 | 32.3 | 36.3 | 35.6 |
| 53. | TC172581 | 67.1 | 68.4 | 65.6 | 82.2 | | 53.3 | 54.0 | 43.5 | 34.0 | 31.8 | 52.1 | 96.7 | 34.2 | 37.7 | 37.1 |
| 54. | AK247217 | 84.4 | 86.1 | 66.9 | 65.6 | 66.8 | | 52.8 | 44.3 | 35.0 | 32.8 | 98.3 | 53.8 | 34.2 | 36.4 | 34.4 |
| 55. | TC104646 | 64.0 | 62.9 | 61.7 | 65.9 | 65.8 | 62.9 | | 48.5 | 34.2 | 34.4 | 53.5 | 55.0 | 34.4 | 36.3 | 35.7 |
| 56. | DV982110 | 58.7 | 57.5 | 53.7 | 57.4 | 53.3 | 55.0 | 60.3 | | 54.2 | 40.7 | 45.0 | 43.2 | 34.7 | 38.2 | 41.9 |
| 57. | WO051050seqID516 | 43.0 | 43.0 | 46.0 | 41.7 | 43.0 | 42.3 | 42.3 | 55.7 | | 37.2 | 34.6 | 33.7 | 38.0 | 37.3 | 29.6 |
| 58. | TC68930 | 51.1 | 48.9 | 50.2 | 48.3 | 50.2 | 49.5 | 47.7 | 53.2 | 47.9 | | 32.9 | 31.7 | 31.5 | 36.6 | 35.7 |
| 59. | TA30646 | 84.8 | 85.8 | 66.9 | 65.2 | 66.8 | 99.0 | 63.6 | 56.6 | 42.1 | 49.2 | | 53.0 | 32.0 | 36.7 | 34.4 |
| 60. | TA28621 | 67.8 | 69.1 | 66.0 | 83.6 | 97.7 | 67.1 | 65.5 | 53.6 | 43.8 | 48.3 | 67.4 | 33.6 | 39.1 | 37.4 | 51.4 |
| 61. | TA34455 | 40.9 | 42.5 | 43.0 | 40.9 | 43.2 | 41.4 | 40.0 | 42.5 | 53.8 | 44.5 | 41.2 | 42.7 | | 61.4 | 30.3 |
| 62. | TA37666 | 50.3 | 47.6 | 48.2 | 49.7 | 48.4 | 47.6 | 44.5 | 46.1 | 48.8 | 51.0 | 48.2 | 49.5 | 70.7 | | 32.2 |
| 63. | TC253044 | 54.0 | 54.5 | 49.1 | 54.4 | 53.6 | 51.7 | 50.0 | 55.2 | 40.0 | 51.7 | 51.0 | 53.9 | 40.9 | 47.1 | |
| 64. | TabHLH11 | 63.3 | 63.2 | 59.5 | 65.9 | 66.1 | 65.6 | 83.3 | 60.5 | 43.0 | 46.2 | 65.2 | 64.5 | 41.6 | 45.5 | 51.4 |
| 65. | TA46156 | 85.7 | 87.0 | 65.0 | 66.9 | 67.8 | 82.5 | 65.1 | 60.2 | 42.5 | 48.9 | 82.5 | 69.4 | 41.6 | 47.6 | 53.8 |
| 66. | GSVIVT00017237001 | 45.2 | 44.7 | 45.0 | 43.1 | 44.7 | 44.7 | 41.4 | 45.7 | 55.9 | 47.4 | 44.5 | 45.2 | 67.1 | 64.4 | 43.5 |
| 67. | TA46194 | 73.8 | 73.5 | 74.8 | 72.5 | 73.2 | 74.4 | 66.8 | 56.9 | 44.3 | 50.5 | 74.4 | 73.5 | 45.2 | 50.5 | 51.1 |
| 68. | GSVIVT00016367001 | 36.3 | 37.9 | 37.9 | 36.7 | 37.3 | 38.8 | 34.6 | 37.3 | 44.5 | 40.6 | 38.6 | 37.1 | 46.8 | 42.7 | 41.4 |
| 69. | TA139285 | 61.7 | 61.2 | 64.1 | 66.2 | 65.5 | 64.2 | 82.5 | 59.6 | 42.8 | 48.6 | 64.6 | 65.8 | 43.2 | 44.0 | 54.8 |
| 70. | TA126400 | 65.0 | 64.9 | 62.0 | 66.2 | 64.5 | 61.9 | 92.3 | 59.3 | 42.5 | 48.0 | 61.9 | 65.5 | 40.7 | 46.1 | 53.8 |

| | | 64 | 65 | 66 | 67 | 68 | 69 | 70 |
|---|---|---|---|---|---|---|---|---|
| 1. | TC3698 | 56.1 | 53.5 | 34.9 | 54.6 | 25.8 | 58.1 | 55.7 |
| 2. | AT1G03040 | 50.6 | 63.2 | 33.5 | 53.4 | 28.0 | 50.8 | 49.4 |
| 3. | AT4G02590 | 53.7 | 69.0 | 34.8 | 56.3 | 28.5 | 53.7 | 50.7 |
| 4. | AT2G24260 | 17.0 | 16.3 | 22.1 | 16.5 | 16.3 | 16.8 | 16.5 |
| 5. | AT4G30980 | 39.5 | 38.6 | 39.7 | 37.3 | 29.5 | 40.2 | 40.5 |
| 6. | AT5G58010 | 37.3 | 36.1 | 36.2 | 35.9 | 28.6 | 38.4 | 37.5 |
| 7. | TC15501 | 51.1 | 59.6 | 34.8 | 64.3 | 30.7 | 53.4 | 49.7 |
| 8. | TC19278 | 19.9 | 21.3 | 20.0 | 20.1 | 19.5 | 20.2 | 20.1 |
| 9. | TC10015_part | 53.9 | 68.5 | 33.2 | 54.4 | 26.9 | 51.8 | 51.6 |
| 10. | DY268946 | 49.0 | 45.3 | 36.4 | 50.0 | 30.2 | 46.1 | 45.5 |
| 11. | TA2544 | 32.9 | 36.3 | 42.9 | 37.1 | 33.9 | 36.2 | 35.0 |
| 12. | TA3392 | 53.7 | 73.3 | 34.2 | 57.6 | 28.0 | 54.4 | 52.6 |
| 13. | TA12416 | 32.9 | 33.3 | 58.2 | 33.3 | 31.9 | 31.8 | 33.3 |
| 14. | WO051050seqID77 | 49.2 | 56.2 | 33.4 | 60.3 | 26.9 | 52.6 | 51.2 |
| 15. | WO051050seqID1671 | 48.9 | 66.8 | 34.0 | 57.0 | 29.8 | 49.6 | 48.9 |
| 16. | TA55042 | 49.0 | 51.4 | 34.2 | 56.0 | 28.4 | 52.0 | 51.2 |
| 17. | TC207545 | 54.5 | 67.5 | 33.2 | 55.4 | 26.1 | 54.6 | 55.6 |
| 18. | TA13791 | 54.7 | 75.6 | 36.5 | 59.8 | 29.1 | 54.6 | 53.7 |
| 19. | CO123623 | 53.0 | 49.4 | 30.9 | 55.6 | 27.3 | 52.5 | 51.9 |
| 20. | DT543504 | 37.9 | 36.0 | 31.4 | 34.5 | 37.8 | 34.8 | 35.2 |
| 21. | TC60118 | 54.4 | 75.2 | 36.5 | 59.5 | 29.1 | 54.2 | 53.4 |
| 22. | TC60119 | 53.9 | 75.7 | 35.6 | 59.4 | 29.0 | 53.9 | 51.2 |
| 23. | TC61833 | 53.1 | 73.4 | 35.2 | 59.2 | 28.6 | 53.8 | 52.5 |
| 24. | TC67603 | 32.6 | 34.9 | 51.4 | 34.0 | 31.0 | 32.4 | 33.9 |
| 25. | TC229602 | 51.4 | 63.3 | 29.4 | 53.2 | 23.3 | 51.4 | 50.0 |
| 26. | TC205173 | 38.1 | 39.7 | 52.3 | 40.4 | 30.7 | 37.6 | 38.8 |
| 27. | TA1140 | 52.1 | 54.3 | 35.5 | 61.0 | 27.7 | 54.6 | 52.8 |
| 28. | TC140470 | 25.1 | 24.9 | 29.7 | 28.1 | 34.4 | 25.2 | 25.5 |
| 29. | TA3490_part | 54.6 | 58.5 | 34.0 | 61.3 | 26.3 | 55.1 | 54.5 |
| 30. | CK293938 | 52.6 | 55.9 | 34.3 | 65.0 | 27.8 | 55.8 | 54.2 |
| 31. | TC8633 | 53.7 | 71.7 | 36.0 | 59.3 | 29.4 | 54.1 | 50.9 |
| 32. | TC7102 | 36.8 | 34.2 | 54.6 | 35.6 | 30.0 | 34.8 | 34.0 |
| 33. | TC7103 | 39.1 | 36.0 | 53.1 | 38.0 | 29.6 | 38.5 | 36.9 |
| 34. | TC12771 | 53.7 | 57.2 | 33.9 | 66.2 | 28.7 | 55.8 | 54.2 |
| 35. | Os03g58330 | 80.3 | 53.5 | 34.5 | 58.3 | 27.8 | 87.2 | 69.4 |
| 36. | Os06g08500 | 34.1 | 32.6 | 40.3 | 33.5 | 27.5 | 35.9 | 32.3 |
| 37. | Os06g09370 | 26.8 | 27.4 | 29.2 | 27.7 | 34.1 | 28.0 | 25.9 |
| 38. | Os02g55250 | 33.8 | 33.6 | 46.3 | 34.4 | 30.3 | 34.6 | 34.8 |
| 39. | Os02g35660 | 27.1 | 25.9 | 31.3 | 27.7 | 33.7 | 27.2 | 27.6 |
| 40. | Os07g08440 | 74.9 | 53.0 | 35.8 | 57.1 | 27.0 | 79.7 | 76.2 |
| 41. | Os09g25040 | 31.1 | 30.5 | 47.3 | 31.6 | 30.4 | 32.3 | 31.4 |
| 42. | Pt_scaff_II.416 | 53.9 | 74.1 | 34.4 | 61.5 | 28.9 | 55.3 | 52.2 |
| 43. | Pt_scaff_70.65 | 48.8 | 53.6 | 35.0 | 58.9 | 28.0 | 49.5 | 50.1 |
| 44. | Pt_scaff_XIII.403 | 47.5 | 50.3 | 35.8 | 57.4 | 29.5 | 47.6 | 48.1 |
| 45. | Pt_scaff28.86 | 28.1 | 28.3 | 34.3 | 31.0 | 49.3 | 29.8 | 26.4 |
| 46. | Pt_TC63334 | 54.8 | 76.6 | 35.1 | 60.0 | 28.5 | 55.6 | 53.1 |
| 47. | TA14134 | 32.0 | 32.4 | 33.7 | 32.5 | 29.4 | 32.9 | 32.2 |
| 48. | TA5414 | 32.9 | 33.8 | 57.9 | 33.8 | 32.1 | 32.6 | 32.8 |
| 49. | TA3263 | 55.1 | 76.9 | 35.6 | 60.0 | 28.3 | 55.6 | 53.4 |
| 50. | TA2825 | 55.8 | 77.7 | 35.8 | 62.0 | 28.0 | 55.5 | 53.7 |
| 51. | TA1616 | 51.4 | 56.6 | 34.4 | 62.5 | 29.2 | 55.0 | 54.4 |
| 52. | TA21665 | 52.1 | 52.9 | 33.2 | 60.5 | 27.6 | 53.6 | 52.7 |
| 53. | TC172581 | 51.9 | 57.3 | 35.3 | 64.2 | 28.6 | 53.1 | 51.6 |
| 54. | AK247217 | 54.0 | 73.9 | 35.3 | 60.2 | 30.1 | 53.3 | 50.9 |
| 55. | TC104646 | 74.4 | 54.6 | 34.2 | 58.1 | 26.3 | 77.6 | 91.2 |
| 56. | DV982110 | 45.8 | 45.4 | 37.3 | 43.8 | 29.7 | 46.7 | 45.9 |
| 57. | WO051050seqID516 | 33.4 | 35.4 | 40.4 | 36.1 | 29.6 | 34.8 | 33.3 |
| 58. | TC68930 | 32.2 | 32.1 | 35.4 | 32.3 | 30.7 | 34.3 | 34.6 |
| 59. | TA30646 | 54.7 | 73.9 | 35.5 | 60.2 | 29.5 | 54.9 | 51.2 |
| 60. | TA28621 | 56.2 | 35.3 | 63.5 | 28.7 | 53.4 | 52.2 | |
| 61. | TA34455 | 35.9 | 33.5 | 50.6 | 35.4 | 32.2 | 34.9 | 34.6 |
| 62. | TA37666 | 39.2 | 36.2 | 52.3 | 38.4 | 30.4 | 37.4 | 37.9 |
| 63. | TC253044 | 34.6 | 36.5 | 33.0 | 37.2 | 30.6 | 35.8 | 35.8 |
| 64. | TabHLH11 | 52.5 | 33.3 | 55.7 | 27.7 | 82.7 | 70.7 | |
| 65. | TA46156 | 66.4 | | 35.1 | 65.7 | 27.0 | 55.3 | 52.9 |
| 66. | GSVIVT00017237001 | 41.9 | 45.9 | | 36.0 | 31.6 | 32.5 | 35.6 |
| 67. | TA46194 | 66.1 | 75.7 | 45.0 | | 29.3 | 57.5 | 56.5 |
| 68. | GSVIVT00016367001 | 35.1 | 36.1 | 44.5 | 37.5 | | 26.9 | 26.1 |
| 69. | TA139285 | 89.5 | 66.4 | 40.0 | 68.1 | 37.3 | | 72.8 |
| 70. | TA126400 | 79.6 | 65.1 | 41.9 | 66.5 | 35.7 | 80.4 | |

TABLE E3
MatGAT results for global similarity and identity over the HLH domains of the bHLH11-like polypeptide sequences.

| | | 1 | 2 | 3 | 4 | 5 | 6 | 7 | 8 | 9 | 10 | 11 | 12 | 13 | 14 | 15 | 16 | 17 |
|---|---|---|---|---|---|---|---|---|---|---|---|---|---|---|---|---|---|---|
| 1. | AT2G24260 | | 98.0 | 92.2 | 98.0 | 98.0 | 98.0 | 98.0 | 98.0 | 98.0 | 94.1 | 94.1 | 96.1 | 86.3 | 98.0 | 88.9 | 96.1 | 98.0 |
| 2. | AT4G30980 | 100.0 | | 94.1 | 96.1 | 96.1 | 96.1 | 96.1 | 96.1 | 96.1 | 96.1 | 96.1 | 94.1 | 88.2 | 96.1 | 87.0 | 94.1 | 96.1 |
| 3. | AT5G58010 | 98.0 | 98.0 | | 92.2 | 92.2 | 92.2 | 92.2 | 92.2 | 92.2 | 96.1 | 96.1 | 90.2 | 84.3 | 92.2 | 83.3 | 90.2 | 92.2 |
| 4. | TA12416 | 98.0 | 98.0 | 98.0 | | 100.0 | 100.0 | 100.0 | 100.0 | 100.0 | 96.1 | 96.1 | 98.0 | 88.2 | 100.0 | 90.7 | 98.0 | 98.0 |
| 5. | TA5414 | 98.0 | 98.0 | 98.0 | 100.0 | | 100.0 | 100.0 | 100.0 | 100.0 | 96.1 | 96.1 | 98.0 | 88.2 | 100.0 | 90.7 | 98.0 | 98.0 |
| 6. | TC205173 | 98.0 | 98.0 | 98.0 | 100.0 | 100.0 | | 100.0 | 100.0 | 100.0 | 96.1 | 96.1 | 98.0 | 88.2 | 100.0 | 90.7 | 98.0 | 98.0 |
| 7. | GSVIVT00017237001 | 98.0 | 98.0 | 98.0 | 100.0 | 100.0 | 100.0 | | 100.0 | 100.0 | 96.1 | 96.1 | 98.0 | 88.2 | 100.0 | 90.7 | 98.0 | 98.0 |
| 8. | TC7102 | 98.0 | 98.0 | 98.0 | 100.0 | 100.0 | 100.0 | 100.0 | | 100.0 | 96.1 | 96.1 | 98.0 | 88.2 | 100.0 | 90.7 | 98.0 | 98.0 |
| 9. | TA34455 | 98.0 | 98.0 | 98.0 | 100.0 | 100.0 | 100.0 | 100.0 | 100.0 | | 96.1 | 96.1 | 98.0 | 88.2 | 100.0 | 90.7 | 98.0 | 98.0 |
| 10. | TC7103 | 98.0 | 98.0 | 98.0 | 100.0 | 100.0 | 100.0 | 100.0 | 100.0 | 100.0 | | 100.0 | 94.1 | 88.2 | 96.1 | 87.0 | 94.1 | 94.1 |
| 11. | TA37666 | 98.0 | 98.0 | 98.0 | 100.0 | 100.0 | 100.0 | 100.0 | 100.0 | 100.0 | 100.0 | | 94.1 | 88.2 | 96.1 | 87.0 | 94.1 | 94.1 |
| 12. | TC67603 | 96.1 | 96.1 | 96.1 | 98.0 | 98.0 | 98.0 | 98.0 | 98.0 | 98.0 | 98.0 | 98.0 | | 86.3 | 98.0 | 88.9 | 96.1 | 96.1 |
| 13. | Os06g08500 | 90.2 | 90.2 | 90.2 | 92.2 | 92.2 | 92.2 | 92.2 | 92.2 | 92.2 | 92.2 | 92.2 | 90.2 | | 88.2 | 79.6 | 86.3 | 86.3 |
| 14. | Os02g55250 | 98.0 | 98.0 | 98.0 | 100.0 | 100.0 | 100.0 | 100.0 | 100.0 | 100.0 | 100.0 | 100.0 | 98.0 | 92.2 | | 90.7 | 98.0 | 98.0 |
| 15. | Os09g25040 | 88.9 | 88.9 | 88.9 | 90.7 | 90.7 | 90.7 | 90.7 | 90.7 | 90.7 | 90.7 | 90.7 | 88.9 | 83.3 | 90.7 | | 88.9 | 88.9 |
| 16. | TA2544 | 98.0 | 98.0 | 98.0 | 100.0 | 100.0 | 100.0 | 100.0 | 100.0 | 100.0 | 100.0 | 100.0 | 98.0 | 92.2 | 100.0 | 90.7 | | 96.1 |
| 17. | DV982110 | 98.0 | 98.0 | 100.0 | 100.0 | 100.0 | 100.0 | 100.0 | 100.0 | 100.0 | 100.0 | 100.0 | 98.0 | 92.2 | 100.0 | 90.7 | 100.0 | |
| 18. | WO051050seqID516 | 98.0 | 98.0 | 100.0 | 100.0 | 100.0 | 100.0 | 100.0 | 100.0 | 100.0 | 100.0 | 100.0 | 98.0 | 92.2 | 100.0 | 90.7 | 100.0 | 100.0 |
| 19. | AT4G02590 | 96.1 | 96.1 | 96.1 | 96.1 | 96.1 | 96.1 | 96.1 | 96.1 | 96.1 | 96.1 | 96.1 | 94.1 | 88.2 | 96.1 | 87.0 | 96.1 | 96.1 |
| 20. | TC10015_part | 96.1 | 96.1 | 96.1 | 96.1 | 96.1 | 96.1 | 96.1 | 96.1 | 96.1 | 96.1 | 96.1 | 94.1 | 88.2 | 96.1 | 87.0 | 96.1 | 96.1 |
| 21. | AT1G03040 | 96.1 | 96.1 | 96.1 | 96.1 | 96.1 | 96.1 | 96.1 | 96.1 | 96.1 | 96.1 | 96.1 | 94.1 | 88.2 | 96.1 | 87.0 | 96.1 | 96.1 |
| 22. | TA13791 | 98.0 | 98.0 | 98.0 | 98.0 | 98.0 | 98.0 | 98.0 | 98.0 | 98.0 | 98.0 | 98.0 | 96.1 | 90.2 | 98.0 | 88.9 | 98.0 | 98.0 |
| 23. | TC60118 | 98.0 | 98.0 | 98.0 | 98.0 | 98.0 | 98.0 | 98.0 | 98.0 | 98.0 | 98.0 | 98.0 | 96.1 | 90.2 | 98.0 | 88.9 | 98.0 | 98.0 |
| 24. | TC60119 | 94.1 | 94.1 | 94.1 | 94.1 | 94.1 | 94.1 | 94.1 | 94.1 | 94.1 | 94.1 | 94.1 | 92.2 | 86.3 | 94.1 | 85.2 | 94.1 | 94.1 |
| 25. | TC61833 | 96.1 | 96.1 | 96.1 | 96.1 | 96.1 | 96.1 | 96.1 | 96.1 | 96.1 | 96.1 | 96.1 | 94.1 | 88.2 | 96.1 | 87.0 | 96.1 | 96.1 |
| 26. | TA3392 | 98.0 | 98.0 | 98.0 | 98.0 | 98.0 | 98.0 | 98.0 | 98.0 | 98.0 | 98.0 | 98.0 | 96.1 | 90.2 | 98.0 | 88.9 | 98.0 | 98.0 |
| 27. | WO051050seqID1671 | 96.1 | 96.1 | 96.1 | 96.1 | 96.1 | 96.1 | 96.1 | 96.1 | 96.1 | 96.1 | 96.1 | 94.1 | 88.2 | 96.1 | 87.0 | 96.1 | 96.1 |
| 28. | Pt_TC63334 | 96.1 | 96.1 | 96.1 | 96.1 | 96.1 | 96.1 | 96.1 | 96.1 | 96.1 | 96.1 | 96.1 | 94.1 | 88.2 | 96.1 | 87.0 | 96.1 | 96.1 |
| 29. | TA3263 | 98.0 | 98.0 | 98.0 | 98.0 | 98.0 | 98.0 | 98.0 | 98.0 | 98.0 | 98.0 | 98.0 | 96.1 | 90.2 | 98.0 | 88.9 | 98.0 | 98.0 |
| 30. | Pt_scaff_II.416 | 98.0 | 98.0 | 98.0 | 98.0 | 98.0 | 98.0 | 98.0 | 98.0 | 98.0 | 98.0 | 98.0 | 96.1 | 90.2 | 98.0 | 88.9 | 98.0 | 98.0 |
| 31. | TA2825 | 98.0 | 98.0 | 98.0 | 98.0 | 98.0 | 98.0 | 98.0 | 98.0 | 98.0 | 98.0 | 98.0 | 96.1 | 90.2 | 98.0 | 88.9 | 98.0 | 98.0 |
| 32. | TC207545 | 98.0 | 98.0 | 98.0 | 98.0 | 98.0 | 98.0 | 98.0 | 98.0 | 98.0 | 98.0 | 98.0 | 96.1 | 90.2 | 98.0 | 88.9 | 98.0 | 98.0 |
| 33. | TC229602 | 98.0 | 98.0 | 98.0 | 98.0 | 98.0 | 98.0 | 98.0 | 98.0 | 98.0 | 98.0 | 98.0 | 96.1 | 90.2 | 98.0 | 88.9 | 98.0 | 98.0 |
| 34. | TA46156 | 98.0 | 98.0 | 98.0 | 98.0 | 98.0 | 98.0 | 98.0 | 98.0 | 98.0 | 98.0 | 98.0 | 96.1 | 90.2 | 98.0 | 88.9 | 98.0 | 98.0 |
| 35. | AK247217 | 96.1 | 96.1 | 96.1 | 96.1 | 96.1 | 96.1 | 96.1 | 96.1 | 96.1 | 96.1 | 96.1 | 94.1 | 88.2 | 96.1 | 87.0 | 96.1 | 96.1 |
| 36. | TA30646 | 96.1 | 96.1 | 96.1 | 96.1 | 96.1 | 96.1 | 96.1 | 96.1 | 96.1 | 96.1 | 96.1 | 94.1 | 88.2 | 96.1 | 87.0 | 96.1 | 96.1 |
| 37. | TC8633 | 96.1 | 96.1 | 96.1 | 96.1 | 96.1 | 96.1 | 96.1 | 96.1 | 96.1 | 96.1 | 96.1 | 94.1 | 88.2 | 96.1 | 87.0 | 96.1 | 96.1 |
| 38. | TC15501 | 98.0 | 98.0 | 100.0 | 100.0 | 100.0 | 100.0 | 100.0 | 100.0 | 100.0 | 100.0 | 100.0 | 98.0 | 92.2 | 100.0 | 90.7 | 100.0 | 100.0 |
| 39. | TA1140 | 98.0 | 98.0 | 98.0 | 98.0 | 98.0 | 98.0 | 98.0 | 98.0 | 98.0 | 98.0 | 98.0 | 96.1 | 90.2 | 98.0 | 88.9 | 98.0 | 98.0 |
| 40. | TA3490_part | 98.0 | 98.0 | 98.0 | 98.0 | 98.0 | 98.0 | 98.0 | 98.0 | 98.0 | 98.0 | 98.0 | 96.1 | 90.2 | 98.0 | 88.9 | 98.0 | 98.0 |
| 41. | CK293938 | 98.0 | 98.0 | 98.0 | 98.0 | 98.0 | 98.0 | 98.0 | 98.0 | 98.0 | 98.0 | 98.0 | 96.1 | 90.2 | 98.0 | 88.9 | 98.0 | 98.0 |
| 42. | TC12771 | 98.0 | 98.0 | 98.0 | 98.0 | 98.0 | 98.0 | 98.0 | 98.0 | 98.0 | 98.0 | 98.0 | 96.1 | 90.2 | 98.0 | 88.9 | 98.0 | 98.0 |
| 43. | TC172581 | 98.0 | 98.0 | 98.0 | 98.0 | 98.0 | 98.0 | 98.0 | 98.0 | 98.0 | 98.0 | 98.0 | 96.1 | 90.2 | 98.0 | 88.9 | 98.0 | 98.0 |
| 44. | TA28621 | 98.0 | 98.0 | 98.0 | 98.0 | 98.0 | 98.0 | 98.0 | 98.0 | 98.0 | 98.0 | 98.0 | 96.1 | 90.2 | 98.0 | 88.9 | 98.0 | 98.0 |
| 45. | TA21665 | 98.0 | 98.0 | 98.0 | 98.0 | 98.0 | 98.0 | 98.0 | 98.0 | 98.0 | 98.0 | 98.0 | 96.1 | 90.2 | 98.0 | 88.9 | 98.0 | 98.0 |
| 46. | TA46194 | 98.0 | 98.0 | 100.0 | 100.0 | 100.0 | 100.0 | 100.0 | 100.0 | 100.0 | 100.0 | 100.0 | 98.0 | 92.2 | 100.0 | 90.7 | 100.0 | 100.0 |
| 47. | DY268946 | 98.0 | 98.0 | 98.0 | 98.0 | 98.0 | 98.0 | 98.0 | 98.0 | 98.0 | 98.0 | 98.0 | 96.1 | 90.2 | 98.0 | 88.9 | 98.0 | 98.0 |
| 48. | CO123623 | 98.0 | 98.0 | 98.0 | 98.0 | 98.0 | 98.0 | 98.0 | 98.0 | 98.0 | 98.0 | 98.0 | 96.1 | 90.2 | 98.0 | 88.9 | 98.0 | 98.0 |
| 49. | Pt_scaff_70.65 | 92.2 | 92.2 | 92.2 | 92.2 | 92.2 | 92.2 | 92.2 | 92.2 | 92.2 | 92.2 | 92.2 | 94.1 | 84.3 | 92.2 | 83.3 | 92.2 | 92.2 |
| 50. | Pt_scaff_XIII.403 | 92.2 | 92.2 | 92.2 | 92.2 | 92.2 | 92.2 | 92.2 | 92.2 | 92.2 | 92.2 | 92.2 | 94.1 | 84.3 | 92.2 | 83.3 | 92.2 | 92.2 |
| 51. | TA1616 | 96.1 | 96.1 | 96.1 | 98.0 | 98.0 | 98.0 | 98.0 | 98.0 | 98.0 | 98.0 | 98.0 | 96.1 | 90.2 | 98.0 | 88.9 | 98.0 | 98.0 |
| 52. | TA55042 | 98.0 | 98.0 | 98.0 | 98.0 | 98.0 | 98.0 | 98.0 | 98.0 | 98.0 | 98.0 | 98.0 | 96.1 | 90.2 | 98.0 | 88.9 | 98.0 | 98.0 |
| 53. | WO051050seqID77 | 96.1 | 96.1 | 96.1 | 96.1 | 96.1 | 96.1 | 96.1 | 96.1 | 96.1 | 96.1 | 96.1 | 94.1 | 88.2 | 96.1 | 87.0 | 96.1 | 96.1 |
| 54. | TC3698 | 96.1 | 96.1 | 98.0 | 96.1 | 96.1 | 96.1 | 96.1 | 96.1 | 96.1 | 96.1 | 96.1 | 94.1 | 88.2 | 96.1 | 87.0 | 96.1 | 98.0 |
| 55. | Os03g58330 | 98.0 | 98.0 | 100.0 | 98.0 | 98.0 | 98.0 | 98.0 | 98.0 | 98.0 | 98.0 | 98.0 | 96.1 | 90.2 | 98.0 | 88.9 | 98.0 | 100.0 |
| 56. | TA139285 | 98.0 | 98.0 | 100.0 | 98.0 | 98.0 | 98.0 | 98.0 | 98.0 | 98.0 | 98.0 | 98.0 | 96.1 | 90.2 | 98.0 | 88.9 | 98.0 | 100.0 |
| 57. | TabHLH11 | 96.1 | 96.1 | 98.0 | 96.1 | 96.1 | 96.1 | 96.1 | 96.1 | 96.1 | 96.1 | 96.1 | 94.1 | 88.2 | 96.1 | 87.0 | 96.1 | 98.0 |
| 58. | TC104646 | 98.0 | 98.0 | 100.0 | 98.0 | 98.0 | 98.0 | 98.0 | 98.0 | 98.0 | 98.0 | 98.0 | 96.1 | 90.2 | 98.0 | 88.9 | 98.0 | 100.0 |
| 59. | TA126400 | 98.0 | 98.0 | 100.0 | 98.0 | 98.0 | 98.0 | 98.0 | 98.0 | 98.0 | 98.0 | 98.0 | 96.1 | 90.2 | 98.0 | 88.9 | 98.0 | 100.0 |
| 60. | Os07g08440 | 98.0 | 98.0 | 100.0 | 98.0 | 98.0 | 98.0 | 98.0 | 98.0 | 98.0 | 98.0 | 98.0 | 96.1 | 90.2 | 98.0 | 88.9 | 98.0 | 100.0 |
| 61. | Os02g35660 | 96.1 | 96.1 | 98.0 | 98.0 | 98.0 | 98.0 | 98.0 | 98.0 | 98.0 | 98.0 | 98.0 | 96.1 | 90.2 | 98.0 | 88.9 | 98.0 | 98.0 |
| 62. | DT543504 | 94.1 | 96.1 | 98.0 | 96.1 | 96.1 | 96.1 | 96.1 | 96.1 | 96.1 | 98.0 | 98.0 | 94.1 | 90.2 | 96.1 | 87.0 | 96.1 | 96.1 |
| 63. | Pt_scaff28.86 | 94.1 | 96.1 | 98.0 | 96.1 | 96.1 | 96.1 | 96.1 | 96.1 | 96.1 | 98.0 | 98.0 | 94.1 | 90.2 | 96.1 | 88.9 | 96.1 | 96.1 |
| 64. | GSVIVT00016367001 | 96.1 | 98.0 | 100.0 | 98.0 | 98.0 | 98.0 | 98.0 | 98.0 | 98.0 | 100.0 | 100.0 | 96.1 | 92.2 | 98.0 | 88.9 | 98.0 | 98.0 |
| 65. | TC19278 | 68.6 | 70.6 | 72.5 | 70.6 | 70.6 | 70.6 | 70.6 | 70.6 | 70.6 | 72.5 | 72.5 | 70.6 | 72.5 | 70.6 | 63.0 | 70.6 | 70.6 |
| 66. | TA14134 | 94.1 | 94.1 | 94.1 | 96.1 | 96.1 | 96.1 | 96.1 | 96.1 | 96.1 | 96.1 | 96.1 | 94.1 | 88.2 | 96.1 | 87.0 | 96.1 | 96.1 |
| 67. | TC68930 | 98.0 | 98.0 | 100.0 | 100.0 | 100.0 | 100.0 | 100.0 | 100.0 | 100.0 | 100.0 | 100.0 | 98.0 | 92.2 | 100.0 | 90.7 | 100.0 | 100.0 |
| 68. | TC140470 | 94.1 | 96.1 | 98.0 | 96.1 | 96.1 | 96.1 | 96.1 | 96.1 | 96.1 | 98.0 | 98.0 | 94.1 | 90.2 | 96.1 | 87.0 | 96.1 | 96.1 |
| 69. | TC253044 | 94.1 | 96.1 | 98.0 | 96.1 | 96.1 | 96.1 | 96.1 | 96.1 | 96.1 | 98.0 | 98.0 | 94.1 | 90.2 | 96.1 | 87.0 | 96.1 | 96.1 |
| 70. | Os06g09370 | 92.2 | 94.1 | 96.1 | 94.1 | 94.1 | 94.1 | 94.1 | 94.1 | 94.1 | 96.1 | 96.1 | 92.2 | 88.2 | 94.1 | 85.2 | 94.1 | 94.1 |
| | | 18 | 19 | 20 | 21 | 22 | 23 | 24 | 25 | 26 | 27 | 28 | 29 | 30 | 31 | 32 | 33 | 34 |
| 1. | AT2G24260 | 98.0 | 82.4 | 82.4 | 80.4 | 84.3 | 84.3 | 82.4 | 84.3 | 84.3 | 80.4 | 82.4 | 84.3 | 82.4 | 84.3 | 84.3 | 84.3 | 84.3 |
| 2. | AT4G30980 | 96.1 | 80.4 | 80.4 | 82.4 | 82.4 | 82.4 | 80.4 | 82.4 | 82.4 | 80.4 | 80.4 | 82.4 | 80.4 | 82.4 | 82.4 | 82.4 | 82.4 |
| 3. | AT5G58010 | 92.2 | 76.5 | 76.5 | 78.4 | 78.4 | 78.4 | 76.5 | 78.4 | 78.4 | 76.5 | 76.5 | 78.4 | 76.5 | 78.4 | 78.4 | 78.4 | 78.4 |
| 4. | TA12416 | 98.0 | 82.4 | 82.4 | 80.4 | 84.3 | 84.3 | 82.4 | 84.3 | 84.3 | 80.4 | 82.4 | 84.3 | 82.4 | 84.3 | 84.3 | 84.3 | 84.3 |
| 5. | TA5414 | 98.0 | 82.4 | 82.4 | 80.4 | 84.3 | 84.3 | 82.4 | 84.3 | 84.3 | 80.4 | 82.4 | 84.3 | 82.4 | 84.3 | 84.3 | 84.3 | 84.3 |
| 6. | TC205173 | 98.0 | 82.4 | 82.4 | 80.4 | 84.3 | 84.3 | 82.4 | 84.3 | 84.3 | 80.4 | 82.4 | 84.3 | 82.4 | 84.3 | 84.3 | 84.3 | 84.3 |
| 7. | GSVIVT00017237001 | 98.0 | 82.4 | 82.4 | 80.4 | 84.3 | 84.3 | 82.4 | 84.3 | 84.3 | 80.4 | 82.4 | 84.3 | 82.4 | 84.3 | 84.3 | 84.3 | 84.3 |
| 8. | TC7102 | 98.0 | 82.4 | 82.4 | 80.4 | 84.3 | 84.3 | 82.4 | 84.3 | 84.3 | 80.4 | 82.4 | 84.3 | 82.4 | 84.3 | 84.3 | 84.3 | 84.3 |
| 9. | TA34455 | 98.0 | 82.4 | 82.4 | 80.4 | 84.3 | 84.3 | 82.4 | 84.3 | 84.3 | 80.4 | 82.4 | 84.3 | 82.4 | 84.3 | 84.3 | 84.3 | 84.3 |
| 10. | TC7103 | 94.1 | 78.4 | 78.4 | 80.4 | 80.4 | 80.4 | 78.4 | 80.4 | 80.4 | 78.4 | 78.4 | 80.4 | 78.4 | 80.4 | 80.4 | 80.4 | 80.4 |
| 11. | TA37666 | 94.1 | 78.4 | 78.4 | 80.4 | 80.4 | 80.4 | 78.4 | 80.4 | 80.4 | 78.4 | 78.4 | 80.4 | 78.4 | 80.4 | 80.4 | 80.4 | 80.4 |
| 12. | TC67603 | 96.1 | 80.4 | 80.4 | 78.4 | 82.4 | 82.4 | 80.4 | 82.4 | 82.4 | 78.4 | 80.4 | 82.4 | 80.4 | 82.4 | 82.4 | 82.4 | 82.4 |
| 13. | Os06g08500 | 86.3 | 70.6 | 70.6 | 72.5 | 72.5 | 72.5 | 70.6 | 72.5 | 72.5 | 70.6 | 70.6 | 72.5 | 70.6 | 72.5 | 72.5 | 72.5 | 72.5 |
| 14. | Os02g55250 | 98.0 | 82.4 | 82.4 | 80.4 | 84.3 | 84.3 | 82.4 | 84.3 | 84.3 | 80.4 | 82.4 | 84.3 | 82.4 | 84.3 | 84.3 | 84.3 | 84.3 |
| 15. | Os09g25040 | 88.9 | 74.1 | 74.1 | 72.2 | 75.9 | 75.9 | 74.1 | 75.9 | 75.9 | 72.2 | 74.1 | 75.9 | 75.9 | 75.9 | 75.9 | 75.9 | 75.9 |
| 16. | TA2544 | 96.1 | 80.4 | 80.4 | 78.4 | 82.4 | 82.4 | 80.4 | 82.4 | 82.4 | 78.4 | 80.4 | 82.4 | 80.4 | 82.4 | 82.4 | 82.4 | 82.4 |
| 17. | DV982110 | 100.0 | 82.4 | 82.4 | 80.4 | 84.3 | 84.3 | 82.4 | 84.3 | 84.3 | 80.4 | 82.4 | 84.3 | 82.4 | 84.3 | 84.3 | 84.3 | 84.3 |
| 18. | WO051050seqID516 | 82.4 | 82.4 | 80.4 | 84.3 | 84.3 | 82.4 | 84.3 | 84.3 | 80.4 | 82.4 | 84.3 | 82.4 | 84.3 | 84.3 | 84.3 | 84.3 | |
| 19. | AT4G02590 | 96.1 | | 100.0 | 98.0 | 96.1 | 96.1 | 92.2 | 94.1 | 96.1 | 92.2 | 92.2 | 94.1 | 94.1 | 96.1 | 96.1 | 96.1 | 96.1 |
| 20. | TC10015_part | 96.1 | 100.0 | | 98.0 | 96.1 | 96.1 | 92.2 | 94.1 | 96.1 | 92.2 | 92.2 | 94.1 | 94.1 | 96.1 | 96.1 | 96.1 | 96.1 |
| 21. | AT1G03040 | 96.1 | 100.0 | 100.0 | | 94.1 | 94.1 | 90.2 | 92.2 | 94.1 | 92.2 | 90.2 | 92.2 | 92.2 | 94.1 | 94.1 | 94.1 | 94.1 |
| 22. | TA13791 | 98.0 | 100.0 | 100.0 | 100.0 | | 100.0 | 96.1 | 98.0 | 100.0 | 96.1 | 96.1 | 98.0 | 98.0 | 100.0 | 100.0 | 100.0 | 100.0 |
| 23. | TC60118 | 98.0 | 100.0 | 100.0 | 100.0 | 100.0 | | 96.1 | 98.0 | 100.0 | 96.1 | 96.1 | 98.0 | 98.0 | 100.0 | 100.0 | 100.0 | 100.0 |
| 24. | TC60119 | 94.1 | 96.1 | 96.1 | 96.1 | 96.1 | 96.1 | | 98.0 | 96.1 | 92.2 | 94.1 | 96.1 | 94.1 | 96.1 | 96.1 | 96.1 | 96.1 |
| 25. | TC61833 | 96.1 | 98.0 | 98.0 | 98.0 | 98.0 | 98.0 | 98.0 | | 98.0 | 94.1 | 96.1 | 98.0 | 96.1 | 98.0 | 98.0 | 98.0 | 98.0 |
| 26. | TA3392 | 98.0 | 100.0 | 100.0 | 100.0 | 100.0 | 100.0 | 96.1 | 98.0 | | 96.1 | 96.1 | 98.0 | 98.0 | 100.0 | 100.0 | 100.0 | 100.0 |
| 27. | WO051050seqID1671 | 96.1 | 98.0 | 98.0 | 98.0 | 98.0 | 98.0 | 94.1 | 96.1 | 98.0 | | 92.2 | 94.1 | 94.1 | 96.1 | 96.1 | 96.1 | 96.1 |
| 28. | Pt_TC63334 | 96.1 | 96.1 | 96.1 | 96.1 | 96.1 | 96.1 | 94.1 | 96.1 | 96.1 | 94.1 | | 98.0 | 94.1 | 96.1 | 96.1 | 96.1 | 96.1 |
| 29. | TA3263 | 98.0 | 98.0 | 98.0 | 98.0 | 98.0 | 98.0 | 96.1 | 98.0 | 98.0 | 96.1 | 98.0 | | 96.1 | 98.0 | 98.0 | 98.0 | 98.0 |
| 30. | Pt_scaff_II.416 | 98.0 | 100.0 | 100.0 | 100.0 | 100.0 | 100.0 | 96.1 | 98.0 | 100.0 | 98.0 | 96.1 | 98.0 | | 98.0 | 98.0 | 98.0 | 98.0 |
| 31. | TA2825 | 98.0 | 100.0 | 100.0 | 100.0 | 100.0 | 100.0 | 96.1 | 98.0 | 100.0 | 98.0 | 96.1 | 98.0 | 100.0 | | 100.0 | 100.0 | 100.0 |
| 32. | TC207545 | 98.0 | 100.0 | 100.0 | 100.0 | 100.0 | 100.0 | 96.1 | 98.0 | 100.0 | 98.0 | 96.1 | 98.0 | 100.0 | 100.0 | | 100.0 | 100.0 |
| 33. | TC229602 | 98.0 | 100.0 | 100.0 | 100.0 | 100.0 | 100.0 | 96.1 | 98.0 | 100.0 | 98.0 | 96.1 | 98.0 | 100.0 | 100.0 | 100.0 | | 100.0 |
| 34. | TA46156 | 98.0 | 100.0 | 100.0 | 100.0 | 100.0 | 100.0 | 96.1 | 98.0 | 100.0 | 98.0 | 96.1 | 98.0 | 100.0 | 100.0 | 100.0 | 100.0 | |
| 35. | AK247217 | 96.1 | 98.0 | 98.0 | 98.0 | 98.0 | 98.0 | 98.0 | 100.0 | 98.0 | 96.1 | 96.1 | 98.0 | 98.0 | 98.0 | 98.0 | 98.0 | 98.0 |
| 36. | TA30646 | 96.1 | 98.0 | 98.0 | 98.0 | 98.0 | 98.0 | 98.0 | 100.0 | 98.0 | 96.1 | 96.1 | 98.0 | 98.0 | 98.0 | 98.0 | 98.0 | 98.0 |
| 37. | TC8633 | 96.1 | 96.1 | 96.1 | 96.1 | 98.0 | 98.0 | 98.0 | 100.0 | 98.0 | 96.1 | 96.1 | 98.0 | 98.0 | 98.0 | 98.0 | 98.0 | 98.0 |
| 38. | TC15501 | 100.0 | 98.0 | 98.0 | 98.0 | 98.0 | 98.0 | 94.1 | 96.1 | 98.0 | 96.1 | 94.1 | 96.1 | 98.0 | 98.0 | 98.0 | 98.0 | 98.0 |
| 39. | TA1140 | 98.0 | 98.0 | 98.0 | 98.0 | 98.0 | 98.0 | 94.1 | 96.1 | 98.0 | 96.1 | 94.1 | 96.1 | 98.0 | 98.0 | 98.0 | 98.0 | 98.0 |
| 40. | TA3490_part | 98.0 | 98.0 | 98.0 | 98.0 | 98.0 | 98.0 | 94.1 | 96.1 | 98.0 | 96.1 | 94.1 | 96.1 | 98.0 | 98.0 | 98.0 | 98.0 | 98.0 |
| 41. | CK293938 | 98.0 | 98.0 | 98.0 | 98.0 | 98.0 | 98.0 | 96.1 | 96.1 | 98.0 | 96.1 | 94.1 | 96.1 | 98.0 | 98.0 | 98.0 | 98.0 | 98.0 |
| 42. | TC12771 | 98.0 | 98.0 | 98.0 | 98.0 | 98.0 | 98.0 | 96.1 | 96.1 | 98.0 | 96.1 | 94.1 | 96.1 | 98.0 | 98.0 | 98.0 | 98.0 | 98.0 |
| 43. | TC172581 | 98.0 | 98.0 | 98.0 | 98.0 | 98.0 | 98.0 | 96.1 | 96.1 | 98.0 | 96.1 | 94.1 | 96.1 | 98.0 | 98.0 | 98.0 | 98.0 | 98.0 |
| 44. | TA28621 | 98.0 | 98.0 | 98.0 | 98.0 | 98.0 | 98.0 | 96.1 | 96.1 | 98.0 | 96.1 | 94.1 | 96.1 | 98.0 | 98.0 | 98.0 | 98.0 | 98.0 |
| 45. | TA21665 | 98.0 | 98.0 | 98.0 | 98.0 | 98.0 | 98.0 | 96.1 | 96.1 | 98.0 | 96.1 | 94.1 | 96.1 | 98.0 | 98.0 | 98.0 | 98.0 | 98.0 |
| 46. | TA46194 | 100.0 | 98.0 | 98.0 | 98.0 | 98.0 | 98.0 | 94.1 | 96.1 | 98.0 | 96.1 | 94.1 | 96.1 | 98.0 | 98.0 | 98.0 | 98.0 | 98.0 |
| 47. | DY268946 | 98.0 | 98.0 | 98.0 | 98.0 | 98.0 | 98.0 | 94.1 | 96.1 | 98.0 | 96.1 | 94.1 | 96.1 | 98.0 | 98.0 | 98.0 | 98.0 | 98.0 |
| 48. | CO123623 | 98.0 | 98.0 | 98.0 | 98.0 | 98.0 | 98.0 | 94.1 | 96.1 | 98.0 | 96.1 | 94.1 | 96.1 | 98.0 | 98.0 | 98.0 | 98.0 | 98.0 |
| 49. | Pt_scaff_70.65 | 92.2 | 94.1 | 94.1 | 94.1 | 94.1 | 94.1 | 94.1 | 92.2 | 94.1 | 92.2 | 90.2 | 92.2 | 94.1 | 94.1 | 94.1 | 94.1 | 94.1 |
| 50. | Pt_scaff_XIII.403 | 92.2 | 94.1 | 94.1 | 94.1 | 94.1 | 94.1 | 94.1 | 92.2 | 94.1 | 92.2 | 90.2 | 92.2 | 94.1 | 94.1 | 94.1 | 94.1 | 94.1 |
| 51. | TA1616 | 98.0 | 98.0 | 98.0 | 98.0 | 98.0 | 98.0 | 94.1 | 96.1 | 98.0 | 96.1 | 94.1 | 96.1 | 98.0 | 98.0 | 98.0 | 98.0 | 98.0 |
| 52. | TA55042 | 98.0 | 100.0 | 100.0 | 100.0 | 100.0 | 100.0 | 96.1 | 98.0 | 100.0 | 98.0 | 96.1 | 98.0 | 100.0 | 100.0 | 100.0 | 100.0 | 100.0 |
| 53. | WO051050seqID77 | 96.1 | 96.1 | 96.1 | 96.1 | 96.1 | 96.1 | 94.1 | 94.1 | 96.1 | 94.1 | 92.2 | 94.1 | 96.1 | 96.1 | 96.1 | 96.1 | 96.1 |
| 54. | TC3698 | 98.0 | 96.1 | 96.1 | 96.1 | 96.1 | 96.1 | 96.1 | 98.0 | 96.1 | 94.1 | 94.1 | 96.1 | 96.1 | 96.1 | 96.1 | 96.1 | 96.1 |
| 55. | Os03g58330 | 100.0 | 96.1 | 96.1 | 96.1 | 98.0 | 98.0 | 94.1 | 96.1 | 98.0 | 96.1 | 94.1 | 96.1 | 98.0 | 98.0 | 98.0 | 98.0 | 98.0 |
| 56. | TA139285 | 100.0 | 96.1 | 96.1 | 96.1 | 98.0 | 98.0 | 94.1 | 96.1 | 98.0 | 96.1 | 94.1 | 96.1 | 98.0 | 98.0 | 98.0 | 98.0 | 98.0 |
| 57. | TabHLH11 | 98.0 | 94.1 | 94.1 | 94.1 | 96.1 | 96.1 | 96.1 | 98.0 | 96.1 | 94.1 | 94.1 | 96.1 | 96.1 | 96.1 | 96.1 | 96.1 | 96.1 |
| 58. | TC104646 | 100.0 | 96.1 | 96.1 | 96.1 | 98.0 | 98.0 | 94.1 | 96.1 | 98.0 | 96.1 | 94.1 | 96.1 | 98.0 | 98.0 | 98.0 | 98.0 | 98.0 |
| 59. | TA126400 | 100.0 | 96.1 | 96.1 | 96.1 | 98.0 | 98.0 | 94.1 | 96.1 | 98.0 | 96.1 | 94.1 | 96.1 | 98.0 | 98.0 | 98.0 | 98.0 | 98.0 |
| 60. | Os07g08440 | 100.0 | 96.1 | 96.1 | 96.1 | 98.0 | 98.0 | 94.1 | 96.1 | 98.0 | 96.1 | 94.1 | 96.1 | 98.0 | 98.0 | 98.0 | 98.0 | 98.0 |
| 61. | Os02g35660 | 98.0 | 94.1 | 94.1 | 94.1 | 96.1 | 96.1 | 94.1 | 94.1 | 96.1 | 96.1 | 94.1 | 96.1 | 96.1 | 96.1 | 96.1 | 96.1 | 96.1 |
| 62. | DT543504 | 96.1 | 92.2 | 92.2 | 94.1 | 94.1 | 94.1 | 90.2 | 92.2 | 94.1 | 94.1 | 92.2 | 94.1 | 94.1 | 94.1 | 94.1 | 94.1 | 94.1 |
| 63. | Pt_scaff28.86 | 96.1 | 92.2 | 92.2 | 94.1 | 94.1 | 94.1 | 90.2 | 92.2 | 94.1 | 94.1 | 92.2 | 94.1 | 94.1 | 94.1 | 94.1 | 94.1 | 94.1 |
| 64. | GSVIVT00016367001 | 98.0 | 94.1 | 94.1 | 96.1 | 96.1 | 96.1 | 92.2 | 94.1 | 96.1 | 96.1 | 94.1 | 96.1 | 96.1 | 96.1 | 96.1 | 96.1 | 96.1 |
| 65. | TC19278 | 70.6 | 66.7 | 66.7 | 68.6 | 68.6 | 68.6 | 66.7 | 66.7 | 68.6 | 68.6 | 66.7 | 68.6 | 68.6 | 68.6 | 68.6 | 68.6 | 68.6 |
| 66. | TA14134 | 96.1 | 92.2 | 92.2 | 92.2 | 94.1 | 94.1 | 90.2 | 92.2 | 94.1 | 92.2 | 92.2 | 94.1 | 94.1 | 94.1 | 94.1 | 94.1 | 94.1 |
| 67. | TC68930 | 100.0 | 96.1 | 96.1 | 96.1 | 98.0 | 98.0 | 94.1 | 96.1 | 98.0 | 96.1 | 96.1 | 98.0 | 98.0 | 98.0 | 98.0 | 98.0 | 98.0 |
| 68. | TC140470 | 96.1 | 92.2 | 92.2 | 94.1 | 94.1 | 94.1 | 92.2 | 92.2 | 94.1 | 94.1 | 92.2 | 94.1 | 94.1 | 94.1 | 94.1 | 94.1 | 94.1 |
| 69. | TC253044 | 96.1 | 92.2 | 92.2 | 94.1 | 94.1 | 94.1 | 92.2 | 92.2 | 94.1 | 94.1 | 92.2 | 94.1 | 94.1 | 94.1 | 94.1 | 94.1 | 94.1 |
| 70. | Os06g09370 | 94.1 | 90.2 | 90.2 | 92.2 | 92.2 | 92.2 | 90.2 | 90.2 | 92.2 | 92.2 | 90.2 | 92.2 | 92.2 | 92.2 | 92.2 | 92.2 | 92.2 |
| | | 35 | 36 | 37 | 38 | 39 | 40 | 41 | 42 | 43 | 44 | 45 | 46 | 47 | 48 | 49 | 50 | 51 |
| 1. | AT2G24260 | 82.4 | 84.3 | 86.3 | 88.2 | 88.2 | 88.2 | 84.3 | 84.3 | 84.3 | 84.3 | 84.3 | 88.2 | 84.3 | 88.2 | 82.4 | 80.4 | 86.3 |
| 2. | AT4G30980 | 80.4 | 82.4 | 84.3 | 86.3 | 86.3 | 86.3 | 82.4 | 82.4 | 82.4 | 82.4 | 82.4 | 86.3 | 82.4 | 86.3 | 80.4 | 78.4 | 84.3 |
| 3. | AT5G58010 | 76.5 | 78.4 | 80.4 | 82.4 | 82.4 | 82.4 | 78.4 | 78.4 | 78.4 | 78.4 | 78.4 | 82.4 | 78.4 | 82.4 | 76.5 | 74.5 | 80.4 |
| 4. | TA12416 | 82.4 | 84.3 | 86.3 | 88.2 | 88.2 | 88.2 | 84.3 | 84.3 | 84.3 | 84.3 | 84.3 | 88.2 | 84.3 | 88.2 | 82.4 | 80.4 | 88.2 |
| 5. | TA5414 | 82.4 | 84.3 | 86.3 | 88.2 | 88.2 | 88.2 | 84.3 | 84.3 | 84.3 | 84.3 | 84.3 | 88.2 | 84.3 | 88.2 | 82.4 | 80.4 | 88.2 |
| 6. | TC205173 | 82.4 | 84.3 | 86.3 | 88.2 | 88.2 | 88.2 | 84.3 | 84.3 | 84.3 | 84.3 | 84.3 | 88.2 | 84.3 | 88.2 | 82.4 | 80.4 | 88.2 |
| 7. | GSVIVT00017237001 | 82.4 | 84.3 | 86.3 | 88.2 | 88.2 | 88.2 | 84.3 | 84.3 | 84.3 | 84.3 | 84.3 | 88.2 | 84.3 | 88.2 | 82.4 | 80.4 | 88.2 |
| 8. | TC7102 | 82.4 | 84.3 | 86.3 | 88.2 | 88.2 | 88.2 | 84.3 | 84.3 | 84.3 | 84.3 | 84.3 | 88.2 | 84.3 | 88.2 | 82.4 | 80.4 | 88.2 |
| 9. | TA34455 | 82.4 | 84.3 | 86.3 | 88.2 | 88.2 | 88.2 | 84.3 | 84.3 | 84.3 | 84.3 | 84.3 | 88.2 | 84.3 | 88.2 | 82.4 | 80.4 | 88.2 |
| 10. | TC7103 | 78.4 | 80.4 | 82.4 | 84.3 | 84.3 | 84.3 | 80.4 | 80.4 | 80.4 | 80.4 | 80.4 | 84.3 | 80.4 | 84.3 | 78.4 | 76.5 | 84.3 |
| 11. | TA37666 | 78.4 | 80.4 | 82.4 | 84.3 | 84.3 | 84.3 | 80.4 | 80.4 | 80.4 | 80.4 | 80.4 | 84.3 | 80.4 | 84.3 | 78.4 | 76.5 | 84.3 |
| 12. | TC67603 | 80.4 | 82.4 | 84.3 | 86.3 | 86.3 | 86.3 | 82.4 | 82.4 | 82.4 | 82.4 | 82.4 | 86.3 | 82.4 | 86.3 | 84.3 | 82.4 | 86.3 |
| 13. | Os06g08500 | 70.6 | 72.5 | 74.5 | 76.5 | 76.5 | 76.5 | 72.5 | 72.5 | 72.5 | 72.5 | 72.5 | 76.5 | 72.5 | 76.5 | 70.6 | 68.6 | 76.5 |
| 14. | Os02g55250 | 82.4 | 84.3 | 86.3 | 88.2 | 88.2 | 88.2 | 84.3 | 84.3 | 84.3 | 84.3 | 84.3 | 88.2 | 84.3 | 88.2 | 82.4 | 80.4 | 88.2 |
| 15. | Os09g25040 | 74.1 | 75.9 | 77.8 | 79.6 | 79.6 | 79.6 | 75.9 | 75.9 | 75.9 | 75.9 | 75.9 | 79.6 | 75.9 | 79.6 | 74.1 | 72.2 | 79.6 |
| 16. | TA2544 | 82.4 | 82.4 | 84.3 | 86.3 | 86.3 | 86.3 | 82.4 | 82.4 | 82.4 | 82.4 | 82.4 | 86.3 | 82.4 | 86.3 | 80.4 | 78.4 | 86.3 |
| 17. | DV982110 | 82.4 | 84.3 | 86.3 | 90.2 | 88.2 | 88.2 | 84.3 | 84.3 | 84.3 | 84.3 | 84.3 | 90.2 | 84.3 | 88.2 | 82.4 | 80.4 | 86.3 |
| 18. | WO051050seqID516 | 82.4 | 84.3 | 86.3 | 90.2 | 88.2 | 88.2 | 84.3 | 84.3 | 84.3 | 84.3 | 84.3 | 90.2 | 84.3 | 88.2 | 82.4 | 80.4 | 86.3 |
| 19. | AT4G02590 | 92.2 | 94.1 | 94.1 | 90.2 | 88.2 | 88.2 | 88.2 | 88.2 | 88.2 | 88.2 | 88.2 | 90.2 | 90.2 | 90.2 | 88.2 | 86.3 | 94.1 |
| 20. | TC10015_part | 92.2 | 94.1 | 94.1 | 90.2 | 88.2 | 88.2 | 88.2 | 88.2 | 88.2 | 88.2 | 88.2 | 90.2 | 90.2 | 90.2 | 88.2 | 86.3 | 94.1 |
| 21. | AT1G03040 | 90.2 | 92.2 | 92.2 | 88.2 | 86.3 | 86.3 | 86.3 | 86.3 | 86.3 | 86.3 | 86.3 | 88.2 | 88.2 | 88.2 | 86.3 | 84.3 | 92.2 |
| 22. | TA13791 | 96.1 | 98.0 | 96.1 | 94.1 | 92.2 | 92.2 | 92.2 | 92.2 | 92.2 | 92.2 | 92.2 | 94.1 | 94.1 | 94.1 | 88.2 | 86.3 | 90.2 |
| 23. | TC60118 | 96.1 | 98.0 | 96.1 | 94.1 | 92.2 | 92.2 | 92.2 | 92.2 | 92.2 | 92.2 | 92.2 | 94.1 | 94.1 | 94.1 | 88.2 | 86.3 | 90.2 |
| 24. | TC60119 | 96.1 | 98.0 | 94.1 | 90.2 | 88.2 | 88.2 | 90.2 | 90.2 | 90.2 | 90.2 | 90.2 | 90.2 | 90.2 | 90.2 | 88.2 | 86.3 | 86.3 |
| 25. | TC61833 | 98.0 | 100.0 | 96.1 | 92.2 | 90.2 | 90.2 | 90.2 | 90.2 | 90.2 | 90.2 | 90.2 | 92.2 | 92.2 | 92.2 | 86.3 | 84.3 | 88.2 |
| 26. | TA3392 | 96.1 | 98.0 | 96.1 | 94.1 | 92.2 | 92.2 | 92.2 | 92.2 | 92.2 | 92.2 | 92.2 | 94.1 | 94.1 | 94.1 | 88.2 | 86.3 | 90.2 |
| 27. | WO051050seqID1671 | 92.2 | 94.1 | 92.2 | 90.2 | 88.2 | 88.2 | 88.2 | 88.2 | 88.2 | 88.2 | 88.2 | 90.2 | 90.2 | 90.2 | 84.3 | 82.4 | 86.3 |
| 28. | Pt_TC63334 | 94.1 | 96.1 | 94.1 | 90.2 | 88.2 | 88.2 | 88.2 | 88.2 | 88.2 | 88.2 | 88.2 | 90.2 | 90.2 | 90.2 | 84.3 | 82.4 | 86.3 |
| 29. | TA3263 | 96.1 | 98.0 | 96.1 | 92.2 | 90.2 | 90.2 | 90.2 | 90.2 | 90.2 | 90.2 | 90.2 | 92.2 | 92.2 | 92.2 | 86.3 | 84.3 | 88.2 |
| 30. | Pt_scaff_II.416 | 94.1 | 96.1 | 94.1 | 92.2 | 90.2 | 90.2 | 90.2 | 90.2 | 90.2 | 90.2 | 90.2 | 92.2 | 92.2 | 92.2 | 86.3 | 84.3 | 88.2 |
| 31. | TA2825 | 96.1 | 98.0 | 96.1 | 94.1 | 92.2 | 92.2 | 92.2 | 92.2 | 92.2 | 92.2 | 92.2 | 94.1 | 94.1 | 94.1 | 88.2 | 86.3 | 90.2 |
| 32. | TC207545 | 96.1 | 98.0 | 96.1 | 94.1 | 92.2 | 92.2 | 92.2 | 92.2 | 92.2 | 92.2 | 92.2 | 94.1 | 94.1 | 94.1 | 88.2 | 86.3 | 90.2 |
| 33. | TC229602 | 96.1 | 98.0 | 96.1 | 94.1 | 92.2 | 92.2 | 92.2 | 92.2 | 92.2 | 92.2 | 92.2 | 94.1 | 94.1 | 94.1 | 88.2 | 86.3 | 90.2 |
| 34. | TA46156 | 96.1 | 98.0 | 96.1 | 94.1 | 92.2 | 92.2 | 92.2 | 92.2 | 92.2 | 92.2 | 92.2 | 94.1 | 94.1 | 94.1 | 88.2 | 86.3 | 90.2 |
| 35. | AK247217 | | 98.0 | 94.1 | 90.2 | 88.2 | 88.2 | 88.2 | 88.2 | 88.2 | 88.2 | 88.2 | 90.2 | 90.2 | 90.2 | 84.3 | 82.4 | 86.3 |
| 36. | TA30646 | 100.0 | 96.1 | 92.2 | 90.2 | 90.2 | 90.2 | 90.2 | 90.2 | 90.2 | 90.2 | 92.2 | 92.2 | 92.2 | 86.3 | 84.3 | 88.2 | |
| 37. | TC8633 | 100.0 | 100.0 | | 90.2 | 88.2 | 88.2 | 88.2 | 88.2 | 88.2 | 88.2 | 88.2 | 90.2 | 90.2 | 90.2 | 86.3 | 84.3 | 88.2 |
| 36. | TC15501 | 96.1 | 96.1 | 96.1 | | 92.2 | 92.2 | 92.2 | 92.2 | 92.2 | 92.2 | 92.2 | 100.0 | 94.1 | 98.0 | 90.2 | 88.2 | 94.1 |
| 39. | TA1140 | 96.1 | 96.1 | 96.1 | 98.0 | | 100.0 | 92.2 | 92.2 | 92.2 | 92.2 | 92.2 | 92.2 | 94.1 | 94.1 | 86.3 | 84.3 | 88.2 |
| 40. | TA3490_part | 96.1 | 96.1 | 96.1 | 98.0 | 100.0 | | 92.2 | 92.2 | 92.2 | 92.2 | 92.2 | 92.2 | 94.1 | 94.1 | 86.3 | 84.3 | 88.2 |
| 41. | CK293938 | 96.1 | 96.1 | 96.1 | 98.0 | 100.0 | 100.0 | | 100.0 | 100.0 | 100.0 | 100.0 | 92.2 | 90.2 | 94.1 | 90.2 | 88.2 | 88.2 |
| 42. | TC12771 | 96.1 | 96.1 | 96.1 | 98.0 | 100.0 | 100.0 | 100.0 | | 100.0 | 100.0 | 100.0 | 92.2 | 90.2 | 94.1 | 90.2 | 88.2 | 88.2 |
| 43. | TC172581 | 96.1 | 96.1 | 96.1 | 98.0 | 100.0 | 100.0 | 100.0 | 100.0 | | 100.0 | 100.0 | 92.2 | 90.2 | 94.1 | 90.2 | 88.2 | 88.2 |
| 44. | TA28621 | 96.1 | 96.1 | 96.1 | 98.0 | 100.0 | 100.0 | 100.0 | 100.0 | 100.0 | | 100.0 | 92.2 | 90.2 | 94.1 | 90.2 | 88.2 | 88.2 |
| 45. | TA21665 | 96.1 | 96.1 | 96.1 | 98.0 | 100.0 | 100.0 | 100.0 | 100.0 | 100.0 | 100.0 | | 92.2 | 90.2 | 94.1 | 90.2 | 88.2 | 88.2 |
| 46. | TA46194 | 96.1 | 96.1 | 96.1 | 100.0 | 98.0 | 98.0 | 98.0 | 98.0 | 98.0 | 98.0 | 98.0 | | 94.1 | 98.0 | 90.2 | 88.2 | 94.1 |
| 47. | DY268946 | 96.1 | 96.1 | 96.1 | 98.0 | 100.0 | 100.0 | 100.0 | 100.0 | 100.0 | 100.0 | 100.0 | 98.0 | | 96.1 | 88.2 | 86.3 | 90.2 |
| 48. | CO123623 | 96.1 | 96.1 | 96.1 | 98.0 | 100.0 | 100.0 | 100.0 | 100.0 | 100.0 | 100.0 | 100.0 | 98.0 | 100.0 | | 92.2 | 90.2 | 94.1 |
| 49. | Pt_scaff_70.65 | 92.2 | 92.2 | 90.2 | 94.1 | 96.1 | 96.1 | 98.0 | 98.0 | 98.0 | 98.0 | 98.0 | 94.1 | 96.1 | 96.1 | | 98.0 | 90.2 |
| 50. | Pt_scaff_XIII.403 | 92.2 | 92.2 | 90.2 | 94.1 | 96.1 | 96.1 | 98.0 | 98.0 | 98.0 | 98.0 | 98.0 | 94.1 | 96.1 | 96.1 | 100.0 | | 88.2 |
| 51. | TA1616 | 96.1 | 96.1 | 94.1 | 100.0 | 98.0 | 98.0 | 98.0 | 98.0 | 98.0 | 98.0 | 98.0 | 100.0 | 98.0 | 98.0 | 94.1 | 94.1 | |
| 52. | TA55042 | 98.0 | 98.0 | 98.0 | 98.0 | 98.0 | 98.0 | 98.0 | 98.0 | 98.0 | 98.0 | 98.0 | 98.0 | 98.0 | 98.0 | 94.1 | 94.1 | 98.0 |
| 53. | WO051050seqID77 | 94.1 | 94.1 | 94.1 | 96.1 | 98.0 | 98.0 | 100.0 | 100.0 | 100.0 | 100.0 | 100.0 | 96.1 | 98.0 | 98.0 | 96.1 | 96.1 | 96.1 |
| 54. | TC3698 | 98.0 | 98.0 | 98.0 | 98.0 | 96.1 | 96.1 | 96.1 | 96.1 | 96.1 | 96.1 | 96.1 | 98.0 | 96.1 | 96.1 | 92.2 | 92.2 | 96.1 |
| 55. | Os03g58330 | 96.1 | 96.1 | 96.1 | 100.0 | 98.0 | 98.0 | 98.0 | 98.0 | 98.0 | 98.0 | 98.0 | 100.0 | 98.0 | 98.0 | 92.2 | 92.2 | 96.1 |
| 56. | TA139285 | 96.1 | 96.1 | 96.1 | 100.0 | 98.0 | 98.0 | 98.0 | 98.0 | 98.0 | 98.0 | 98.0 | 100.0 | 98.0 | 98.0 | 92.2 | 92.2 | 96.1 |
| 57. | TabHLH11 | 98.0 | 98.0 | 98.0 | 98.0 | 96.1 | 96.1 | 96.1 | 96.1 | 96.1 | 96.1 | 96.1 | 98.0 | 96.1 | 96.1 | 90.2 | 90.2 | 94.1 |
| 58. | TC104646 | 96.1 | 96.1 | 96.1 | 100.0 | 98.0 | 98.0 | 98.0 | 98.0 | 98.0 | 98.0 | 98.0 | 100.0 | 98.0 | 98.0 | 92.2 | 92.2 | 96.1 |
| 59. | TA126400 | 96.1 | 96.1 | 96.1 | 100.0 | 98.0 | 98.0 | 98.0 | 98.0 | 98.0 | 98.0 | 98.0 | 100.0 | 98.0 | 98.0 | 92.2 | 92.2 | 96.1 |
| 60. | Os07g08440 | 96.1 | 96.1 | 96.1 | 100.0 | 98.0 | 98.0 | 98.0 | 98.0 | 98.0 | 98.0 | 98.0 | 100.0 | 98.0 | 98.0 | 92.2 | 92.2 | 96.1 |
| 61. | Os02g35660 | 94.1 | 94.1 | 94.1 | 98.0 | 96.1 | 96.1 | 96.1 | 96.1 | 96.1 | 96.1 | 96.1 | 98.0 | 96.1 | 96.1 | 92.2 | 92.2 | 96.1 |
| 62. | DT543504 | 92.2 | 92.2 | 92.2 | 96.1 | 94.1 | 94.1 | 94.1 | 94.1 | 94.1 | 94.1 | 94.1 | 96.1 | 94.1 | 94.1 | 88.2 | 88.2 | 94.1 |
| 63. | Pt_scaff28.86 | 92.2 | 92.2 | 92.2 | 96.1 | 94.1 | 94.1 | 94.1 | 94.1 | 94.1 | 94.1 | 94.1 | 96.1 | 94.1 | 94.1 | 88.2 | 88.2 | 94.1 |
| 64. | GSVIVT00016367001 | 94.1 | 94.1 | 94.1 | 98.0 | 96.1 | 96.1 | 96.1 | 96.1 | 96.1 | 96.1 | 96.1 | 98.0 | 96.1 | 96.1 | 90.2 | 90.2 | 96.1 |
| 65. | TC19278 | 66.7 | 66.7 | 66.7 | 70.6 | 68.6 | 68.6 | 68.6 | 68.6 | 68.6 | 68.6 | 68.6 | 70.6 | 68.6 | 68.6 | 66.7 | 66.7 | 68.6 |
| 66. | TA14134 | 92.2 | 92.2 | 92.2 | 96.1 | 94.1 | 94.1 | 94.1 | 94.1 | 94.1 | 94.1 | 94.1 | 96.1 | 92.2 | 94.1 | 88.2 | 88.2 | 94.1 |
| 67. | TC68930 | 96.1 | 96.1 | 96.1 | 100.0 | 98.0 | 98.0 | 98.0 | 98.0 | 98.0 | 98.0 | 98.0 | 100.0 | 98.0 | 98.0 | 92.2 | 92.2 | 98.0 |
| 68. | TC140470 | 92.2 | 92.2 | 92.2 | 96.1 | 94.1 | 94.1 | 94.1 | 94.1 | 94.1 | 94.1 | 94.1 | 96.1 | 94.1 | 94.1 | 90.2 | 90.2 | 94.1 |
| 69. | TC253044 | 92.2 | 92.2 | 92.2 | 96.1 | 94.1 | 94.1 | 94.1 | 94.1 | 94.1 | 94.1 | 94.1 | 96.1 | 94.1 | 94.1 | 90.2 | 90.2 | 94.1 |
| 70. | Os06g09370 | 90.2 | 90.2 | 90.2 | 94.1 | 92.2 | 92.2 | 92.2 | 92.2 | 92.2 | 92.2 | 92.2 | 94.1 | 92.2 | 92.2 | 88.2 | 88.2 | 92.2 |

| | | 52 | 53 | 54 | 55 | 56 | 57 | 58 | 59 | 60 | 61 | 62 | 63 |
|---|---|---|---|---|---|---|---|---|---|---|---|---|---|
| 1. | AT2G24260 | 88.2 | 86.3 | 82.4 | 88.2 | 88.2 | 88.2 | 88.2 | 88.2 | 86.3 | 88.2 | 90.2 | 90.2 |
| 2. | AT4G30980 | 86.3 | 84.3 | 80.4 | 86.3 | 86.3 | 86.3 | 86.3 | 86.3 | 84.3 | 88.2 | 90.2 | 90.2 |
| 3. | AT5G58010 | 82.4 | 80.4 | 82.4 | 84.3 | 84.3 | 84.3 | 84.3 | 84.3 | 82.4 | 84.3 | 88.2 | 90.2 |
| 4. | TA12416 | 88.2 | 86.3 | 82.4 | 88.2 | 88.2 | 88.2 | 88.2 | 88.2 | 86.3 | 88.2 | 90.2 | 90.2 |
| 5. | TA5414 | 88.2 | 86.3 | 82.4 | 88.2 | 88.2 | 88.2 | 88.2 | 88.2 | 86.3 | 88.2 | 90.2 | 90.2 |
| 6. | TC205173 | 88.2 | 86.3 | 82.4 | 88.2 | 88.2 | 88.2 | 88.2 | 88.2 | 86.3 | 88.2 | 90.2 | 90.2 |
| 7. | GSVIVT00017237001 | 88.2 | 86.3 | 82.4 | 88.2 | 88.2 | 88.2 | 88.2 | 88.2 | 86.3 | 88.2 | 90.2 | 90.2 |
| 8. | TC7102 | 88.2 | 86.3 | 82.4 | 88.2 | 88.2 | 88.2 | 88.2 | 88.2 | 86.3 | 88.2 | 90.2 | 90.2 |
| 9. | TA34455 | 88.2 | 86.3 | 82.4 | 88.2 | 88.2 | 88.2 | 88.2 | 88.2 | 86.3 | 88.2 | 90.2 | 90.2 |
| 10. | TC7103 | 84.3 | 82.4 | 78.4 | 84.3 | 84.3 | 84.3 | 84.3 | 84.3 | 82.4 | 86.3 | 88.2 | 88.2 |
| 11. | TA37666 | 84.3 | 82.4 | 78.4 | 84.3 | 84.3 | 84.3 | 84.3 | 84.3 | 82.4 | 86.3 | 88.2 | 88.2 |
| 12. | TC67603 | 86.3 | 84.3 | 80.4 | 86.3 | 86.3 | 86.3 | 86.3 | 86.3 | 84.3 | 86.3 | 88.2 | 88.2 |
| 13. | Os06g08500 | 76.5 | 74.5 | 70.6 | 76.5 | 76.5 | 76.5 | 76.5 | 76.5 | 74.5 | 78.4 | 80.4 | 80.4 |
| 14. | Os02g55250 | 88.2 | 86.3 | 82.4 | 88.2 | 88.2 | 88.2 | 88.2 | 88.2 | 86.3 | 88.2 | 90.2 | 90.2 |
| 15. | Os09g25040 | 79.6 | 77.8 | 74.1 | 79.6 | 79.6 | 79.6 | 79.6 | 79.6 | 77.8 | 79.6 | 81.5 | 81.5 |
| 16. | TA2544 | 86.3 | 84.3 | 80.4 | 86.3 | 86.3 | 86.3 | 86.3 | 86.3 | 84.3 | 86.3 | 88.2 | 88.2 |
| 17. | DV982110 | 88.2 | 86.3 | 82.4 | 88.2 | 88.2 | 88.2 | 88.2 | 88.2 | 86.3 | 90.2 | 92.2 | 92.2 |
| 18. | WO051050seqID516 | 88.2 | 86.3 | 82.4 | 88.2 | 88.2 | 88.2 | 88.2 | 88.2 | 86.3 | 90.2 | 92.2 | 92.2 |
| 19. | AT4G02590 | 90.2 | 88.2 | 90.2 | 90.2 | 90.2 | 88.2 | 90.2 | 90.2 | 88.2 | 72.5 | 74.5 | 74.5 |
| 20. | TC10015_part | 90.2 | 88.2 | 90.2 | 90.2 | 90.2 | 88.2 | 90.2 | 90.2 | 88.2 | 72.5 | 74.5 | 74.5 |
| 21. | AT1G03040 | 88.2 | 86.3 | 88.2 | 88.2 | 88.2 | 86.3 | 88.2 | 88.2 | 86.3 | 72.5 | 74.5 | 74.5 |
| 22. | TA13791 | 94.1 | 92.2 | 94.1 | 92.2 | 92.2 | 90.2 | 92.2 | 92.2 | 90.2 | 74.5 | 76.5 | 76.5 |
| 23. | TC60118 | 94.1 | 92.2 | 94.1 | 92.2 | 92.2 | 90.2 | 92.2 | 92.2 | 90.2 | 74.5 | 76.5 | 76.5 |
| 24. | TC60119 | 90.2 | 90.2 | 94.1 | 88.2 | 88.2 | 90.2 | 88.2 | 88.2 | 86.3 | 74.5 | 74.5 | 74.5 |
| 25. | TC61833 | 92.2 | 90.2 | 96.1 | 90.2 | 90.2 | 92.2 | 90.2 | 90.2 | 88.2 | 74.5 | 76.5 | 76.5 |
| 26. | TA3392 | 94.1 | 92.2 | 94.1 | 92.2 | 92.2 | 90.2 | 92.2 | 92.2 | 90.2 | 74.5 | 76.5 | 76.5 |
| 27. | WO051050seqID1671 | 90.2 | 88.2 | 90.2 | 88.2 | 88.2 | 86.3 | 88.2 | 88.2 | 90.2 | 72.5 | 74.5 | 74.5 |
| 28. | Pt_TC63334 | 90.2 | 88.2 | 92.2 | 88.2 | 88.2 | 88.2 | 88.2 | 88.2 | 86.3 | 72.5 | 74.5 | 74.5 |
| 29. | TA3263 | 92.2 | 90.2 | 94.1 | 90.2 | 90.2 | 90.2 | 90.2 | 90.2 | 88.2 | 74.5 | 76.5 | 76.5 |
| 30. | Pt_scaff_II.416 | 92.2 | 90.2 | 92.2 | 90.2 | 90.2 | 88.2 | 90.2 | 90.2 | 88.2 | 72.5 | 74.5 | 74.5 |
| 31. | TA2825 | 94.1 | 92.2 | 94.1 | 92.2 | 92.2 | 90.2 | 92.2 | 92.2 | 90.2 | 74.5 | 76.5 | 76.5 |
| 32. | TC207545 | 94.1 | 92.2 | 94.1 | 92.2 | 92.2 | 90.2 | 92.2 | 92.2 | 90.2 | 74.5 | 76.5 | 76.5 |
| 33. | TC229602 | 94.1 | 92.2 | 94.1 | 92.2 | 92.2 | 90.2 | 92.2 | 92.2 | 90.2 | 74.5 | 76.5 | 76.5 |
| 34. | TA46156 | 94.1 | 92.2 | 94.1 | 92.2 | 92.2 | 90.2 | 92.2 | 92.2 | 90.2 | 74.5 | 76.5 | 76.5 |
| 35. | AK247217 | 90.2 | 88.2 | 94.1 | 88.2 | 88.2 | 90.2 | 88.2 | 88.2 | 86.3 | 72.5 | 74.5 | 74.5 |
| 36. | TA30646 | 92.2 | 90.2 | 96.1 | 90.2 | 90.2 | 92.2 | 90.2 | 90.2 | 88.2 | 74.5 | 76.5 | 76.5 |
| 37. | TC8633 | 90.2 | 88.2 | 92.2 | 92.2 | 92.2 | 92.2 | 92.2 | 92.2 | 90.2 | 76.5 | 78.4 | 78.4 |
| 38. | TC15501 | 98.0 | 96.1 | 90.2 | 92.2 | 92.2 | 90.2 | 92.2 | 92.2 | 90.2 | 80.4 | 82.4 | 82.4 |
| 39. | TA1140 | 92.2 | 92.2 | 88.2 | 94.1 | 94.1 | 92.2 | 94.1 | 94.1 | 92.2 | 78.4 | 80.4 | 80.4 |
| 40. | TA3490_part | 92.2 | 92.2 | 88.2 | 94.1 | 94.1 | 92.2 | 94.1 | 94.1 | 92.2 | 78.4 | 80.4 | 80.4 |
| 41. | CK293938 | 92.2 | 94.1 | 88.2 | 90.2 | 90.2 | 88.2 | 90.2 | 90.2 | 88.2 | 78.4 | 76.5 | 76.5 |
| 42. | TC12771 | 92.2 | 94.1 | 88.2 | 90.2 | 90.2 | 88.2 | 90.2 | 90.2 | 88.2 | 78.4 | 76.5 | 76.5 |
| 43. | TC172581 | 92.2 | 94.1 | 88.2 | 90.2 | 90.2 | 88.2 | 90.2 | 90.2 | 88.2 | 78.4 | 76.5 | 76.5 |
| 44. | TA28621 | 92.2 | 94.1 | 88.2 | 90.2 | 90.2 | 88.2 | 90.2 | 90.2 | 88.2 | 78.4 | 76.5 | 76.5 |
| 45. | TA21665 | 92.2 | 94.1 | 88.2 | 90.2 | 90.2 | 88.2 | 90.2 | 90.2 | 88.2 | 78.4 | 76.5 | 76.5 |
| 46. | TA46194 | 98.0 | 96.1 | 90.2 | 92.2 | 92.2 | 90.2 | 92.2 | 92.2 | 90.2 | 80.4 | 82.4 | 82.4 |
| 47. | DY268946 | 94.1 | 94.1 | 90.2 | 92.2 | 92.2 | 90.2 | 92.2 | 92.2 | 90.2 | 78.4 | 76.5 | 76.5 |
| 48. | CO123623 | 98.0 | 98.0 | 90.2 | 92.2 | 92.2 | 90.2 | 92.2 | 92.2 | 90.2 | 78.4 | 80.4 | 80.4 |
| 49. | Pt_scaff_70.65 | 90.2 | 92.2 | 84.3 | 86.3 | 86.3 | 84.3 | 86.3 | 86.3 | 84.3 | 74.5 | 74.5 | 74.5 |
| 50. | Pt_scaff_XIII.403 | 88.2 | 90.2 | 82.4 | 84.3 | 84.3 | 82.4 | 84.3 | 84.3 | 82.4 | 72.5 | 72.5 | 72.5 |
| 51. | TA1616 | 94.1 | 92.2 | 86.3 | 90.2 | 90.2 | 88.2 | 90.2 | 90.2 | 88.2 | 76.5 | 78.4 | 78.4 |
| 52. | TA55042 | | 96.1 | 90.2 | 92.2 | 92.2 | 90.2 | 92.2 | 92.2 | 90.2 | 78.4 | 80.4 | 80.4 |
| 53. | WO051050seqID77 | 96.1 | | 88.2 | 90.2 | 90.2 | 88.2 | 90.2 | 90.2 | 88.2 | 78.4 | 78.4 | 78.4 |
| 54. | TC3698 | 96.1 | 94.1 | 90.2 | 90.2 | 92.2 | 90.2 | 90.2 | 88.2 | 72.5 | 76.5 | 78.4 | 80.4 |
| 55. | Os03g58330 | 98.0 | 96.1 | 98.0 | | 100.0 | 98.0 | 100.0 | 100.0 | 98.0 | 78.4 | 80.4 | 80.4 |
| 56. | TA139285 | 98.0 | 96.1 | 98.0 | 100.0 | | 98.0 | 100.0 | 100.0 | 98.0 | 78.4 | 80.4 | 80.4 |
| 57. | TabHLH11 | 96.1 | 94.1 | 100.0 | 98.0 | 98.0 | | 98.0 | 98.0 | 96.1 | 78.4 | 80.4 | 80.4 |
| 58. | TC104646 | 98.0 | 96.1 | 98.0 | 100.0 | 100.0 | 98.0 | | 100.0 | 98.0 | 78.4 | 80.4 | 80.4 |
| 59. | TA126400 | 98.0 | 96.1 | 98.0 | 100.0 | 100.0 | 98.0 | 100.0 | | 98.0 | 78.4 | 80.4 | 80.4 |
| 60. | Os07g08440 | 98.0 | 96.1 | 98.0 | 100.0 | 100.0 | 98.0 | 100.0 | 100.0 | | 76.5 | 78.4 | 78.4 |
| 61. | Os02g35660 | 96.1 | 96.1 | 96.1 | 98.0 | 98.0 | 96.1 | 98.0 | 98.0 | 98.0 | | 88.2 | 88.2 |
| 62. | DT543504 | 94.1 | 92.2 | 94.1 | 96.1 | 96.1 | 94.1 | 96.1 | 96.1 | 96.1 | 98.0 | | 94.1 |
| 63. | Pt_scaff28.86 | 94.1 | 92.2 | 94.1 | 96.1 | 96.1 | 94.1 | 96.1 | 96.1 | 96.1 | 98.0 | 96.1 | |
| 64. | GSVIVT00016367001 | 96.1 | 94.1 | 96.1 | 98.0 | 98.0 | 96.1 | 98.0 | 98.0 | 98.0 | 100.0 | 98.0 | 98.0 |
| 65. | TC19278 | 68.6 | 68.6 | 68.6 | 70.6 | 70.6 | 68.6 | 70.6 | 70.6 | 70.6 | 72.5 | 70.6 | 70.6 |
| 66. | TA14134 | 94.1 | 92.2 | 92.2 | 94.1 | 94.1 | 92.2 | 94.1 | 94.1 | 94.1 | 92.2 | 94.1 | 94.1 |
| 67. | TC68930 | 98.0 | 96.1 | 98.0 | 100.0 | 100.0 | 98.0 | 100.0 | 100.0 | 100.0 | 98.0 | 98.0 | 98.0 |
| 68. | TC140470 | 94.1 | 94.1 | 94.1 | 96.1 | 96.1 | 94.1 | 96.1 | 96.1 | 96.1 | 98.0 | 96.1 | 98.0 |
| 69. | TC253044 | 94.1 | 94.1 | 94.1 | 96.1 | 96.1 | 94.1 | 96.1 | 96.1 | 96.1 | 98.0 | 96.1 | 98.0 |
| 70. | Os06g09370 | 92.2 | 92.2 | 92.2 | 94.1 | 94.1 | 92.2 | 94.1 | 94.1 | 94.1 | 96.1 | 94.1 | 96.1 |

| | | 64 | 65 | 66 | 67 | 68 | 69 | 70 |
|---|---|---|---|---|---|---|---|---|
| 1. | AT2G24260 | 92.2 | 64.7 | 88.2 | 94.1 | 86.3 | 86.3 | 88.2 |
| 2. | AT4G30980 | 92.2 | 64.7 | 90.2 | 96.1 | 86.3 | 86.3 | 88.2 |
| 3. | AT5G58010 | 92.2 | 68.6 | 86.3 | 96.1 | 82.4 | 82.4 | 84.3 |
| 4. | TA12416 | 92.2 | 64.7 | 90.2 | 94.1 | 86.3 | 86.3 | 88.2 |
| 5. | TA5414 | 92.2 | 64.7 | 90.2 | 94.1 | 86.3 | 86.3 | 88.2 |
| 6. | TC205173 | 92.2 | 64.7 | 90.2 | 94.1 | 86.3 | 86.3 | 88.2 |
| 7. | GSVIVT00017237001 | 92.2 | 64.7 | 90.2 | 94.1 | 86.3 | 86.3 | 88.2 |
| 8. | TC7102 | 92.2 | 64.7 | 90.2 | 94.1 | 86.3 | 86.3 | 88.2 |
| 9. | TA34455 | 92.2 | 64.7 | 90.2 | 94.1 | 86.3 | 86.3 | 88.2 |
| 10. | TC7103 | 90.2 | 66.7 | 90.2 | 94.1 | 84.3 | 84.3 | 86.3 |
| 11. | TA37666 | 90.2 | 66.7 | 90.2 | 94.1 | 84.3 | 84.3 | 86.3 |
| 12. | TC67603 | 90.2 | 64.7 | 88.2 | 92.2 | 84.3 | 84.3 | 86.3 |
| 13. | Os06g08500 | 82.4 | 64.7 | 82.4 | 86.3 | 76.5 | 76.5 | 78.4 |
| 14. | Os02g55250 | 92.2 | 64.7 | 90.2 | 94.1 | 86.3 | 86.3 | 88.2 |
| 15. | Os09g25040 | 83.3 | 57.4 | 81.5 | 85.2 | 77.8 | 77.8 | 79.6 |
| 16. | TA2544 | 90.2 | 62.7 | 88.2 | 92.2 | 84.3 | 84.3 | 86.3 |
| 17. | DV982110 | 94.1 | 66.7 | 88.2 | 96.1 | 88.2 | 88.2 | 90.2 |
| 18. | WO051050seqID516 | 94.1 | 66.7 | 88.2 | 96.1 | 88.2 | 88.2 | 90.2 |
| 19. | AT4G02590 | 76.5 | 49.0 | 74.5 | 78.4 | 70.6 | 70.6 | 72.5 |
| 20. | TC10015_part | 76.5 | 49.0 | 74.5 | 78.4 | 70.6 | 70.6 | 72.5 |
| 21. | AT1G03040 | 76.5 | 49.0 | 76.5 | 80.4 | 70.6 | 70.6 | 72.5 |
| 22. | TA13791 | 78.4 | 51.0 | 76.5 | 80.4 | 72.5 | 72.5 | 74.5 |
| 23. | TC60118 | 78.4 | 51.0 | 76.5 | 80.4 | 72.5 | 72.5 | 74.5 |
| 24. | TC60119 | 76.5 | 51.0 | 74.5 | 78.4 | 72.5 | 72.5 | 74.5 |
| 25. | TC61833 | 78.4 | 51.0 | 76.5 | 80.4 | 72.5 | 72.5 | 74.5 |
| 26. | TA3392 | 78.4 | 51.0 | 76.5 | 80.4 | 72.5 | 72.5 | 74.5 |
| 27. | WO051050seqID1671 | 76.5 | 49.0 | 74.5 | 78.4 | 74.5 | 74.5 | 74.5 |
| 28. | Pt_TC63334 | 76.5 | 49.0 | 74.5 | 78.4 | 70.6 | 70.6 | 72.5 |
| 29. | TA3263 | 78.4 | 51.0 | 76.5 | 80.4 | 72.5 | 72.5 | 74.5 |
| 30. | Pt_scaff_II.416 | 76.5 | 49.0 | 74.5 | 78.4 | 70.6 | 70.6 | 72.5 |
| 31. | TA2825 | 78.4 | 51.0 | 76.5 | 80.4 | 72.5 | 72.5 | 74.5 |
| 32. | TC207545 | 78.4 | 51.0 | 76.5 | 80.4 | 72.5 | 72.5 | 74.5 |
| 33. | TC229602 | 78.4 | 51.0 | 76.5 | 80.4 | 72.5 | 72.5 | 74.5 |
| 34. | TA46156 | 78.4 | 51.0 | 76.5 | 80.4 | 72.5 | 72.5 | 74.5 |
| 35. | AK247217 | 76.5 | 49.0 | 74.5 | 78.4 | 70.6 | 70.6 | 72.5 |
| 36. | TA30646 | 78.4 | 51.0 | 76.5 | 80.4 | 72.5 | 72.5 | 74.5 |
| 37. | TC8633 | 80.4 | 52.9 | 78.4 | 82.4 | 74.5 | 74.5 | 76.5 |
| 38. | TC15501 | 84.3 | 56.9 | 78.4 | 86.3 | 78.4 | 78.4 | 80.4 |
| 39. | TA1140 | 82.4 | 54.9 | 78.4 | 84.3 | 76.5 | 76.5 | 78.4 |
| 40. | TA3490_part | 82.4 | 54.9 | 78.4 | 84.3 | 76.5 | 76.5 | 78.4 |
| 41. | CK293938 | 78.4 | 52.9 | 76.5 | 80.4 | 76.5 | 76.5 | 78.4 |
| 42. | TC12771 | 78.4 | 52.9 | 76.5 | 80.4 | 76.5 | 76.5 | 78.4 |
| 43. | TC172581 | 78.4 | 52.9 | 76.5 | 80.4 | 76.5 | 76.5 | 78.4 |
| 44. | TA28621 | 78.4 | 52.9 | 76.5 | 80.4 | 76.5 | 76.5 | 78.4 |
| 45. | TA21665 | 78.4 | 52.9 | 76.5 | 80.4 | 76.5 | 76.5 | 78.4 |
| 46. | TA46194 | 84.3 | 56.9 | 78.4 | 86.3 | 78.4 | 78.4 | 80.4 |
| 47. | DY268946 | 78.4 | 52.9 | 76.5 | 80.4 | 72.5 | 72.5 | 74.5 |
| 48. | CO123623 | 82.4 | 54.9 | 78.4 | 84.3 | 76.5 | 76.5 | 78.4 |
| 49. | Pt_scaff_70.65 | 76.5 | 52.9 | 74.5 | 78.4 | 72.5 | 72.5 | 74.5 |
| 50. | Pt_scaff_XIII.403 | 74.5 | 51.0 | 72.5 | 76.5 | 70.6 | 70.6 | 72.5 |
| 51. | TA1616 | 80.4 | 52.9 | 78.4 | 82.4 | 74.5 | 74.5 | 76.5 |
| 52. | TA55042 | 82.4 | 54.9 | 78.4 | 84.3 | 76.5 | 76.5 | 78.4 |
| 53. | WO051050seqID77 | 80.4 | 54.9 | 76.5 | 82.4 | 76.5 | 76.5 | 78.4 |
| 54. | TC3698 | 52.9 | 74.5 | 82.4 | 70.6 | 70.6 | 72.5 | |
| 55. | Os03g58330 | 82.4 | 54.9 | 78.4 | 84.3 | 76.5 | 76.5 | 78.4 |
| 56. | TA139285 | 82.4 | 54.9 | 78.4 | 84.3 | 76.5 | 76.5 | 78.4 |
| 57. | TabHLH11 | 82.4 | 54.9 | 78.4 | 84.3 | 76.5 | 76.5 | 78.4 |
| 58. | TC104646 | 82.4 | 54.9 | 78.4 | 84.3 | 76.5 | 76.5 | 78.4 |
| 59. | TA126400 | 82.4 | 54.9 | 78.4 | 84.3 | 76.5 | 76.5 | 78.4 |
| 60. | Os07g08440 | 80.4 | 52.9 | 76.5 | 82.4 | 78.4 | 78.4 | 78.4 |
| 61. | Os02g35660 | 90.2 | 64.7 | 82.4 | 88.2 | 88.2 | 88.2 | 90.2 |
| 62. | DT543504 | 96.1 | 66.7 | 82.4 | 92.2 | 88.2 | 88.2 | 90.2 |
| 63. | Pt_scaff28.86 | 98.0 | 68.6 | 82.4 | 94.1 | 90.2 | 90.2 | 92.2 |
| 64. | GSVIVT00016367001 | | 70.6 | 84.3 | 96.1 | 90.2 | 90.2 | 92.2 |
| 65. | TC19278 | 72.5 | | 62.7 | 68.6 | 62.7 | 62.7 | 64.7 |
| 66. | TA14134 | 96.1 | 72.5 | | 88.2 | 78.4 | 78.4 | 80.4 |
| 67. | TC68930 | 100.0 | 72.5 | 96.1 | | 86.3 | 86.3 | 88.2 |
| 68. | TC140470 | 98.0 | 70.6 | 94.1 | 98.0 | 100.0 | 96.1 | |
| 69. | TC253044 | 98.0 | 70.6 | 94.1 | 98.0 | 100.0 | | 96.1 |
| 70. | Os06g09370 | 96.1 | 68.6 | 92.2 | 96.1 | 98.0 | 98.0 | |

### Example 46

### Identification of Domains Comprised in Polypeptide Sequences Useful in Performing the Methods of the Invention

[1265] The Integrated Resource of Protein Families, Domains and Sites (interPro) database is an integrated interface for the commonly used signature databases for text- and sequence-based searches. The InterPro database combines these databases, which use different methodologies and varying degrees of biological information about well-characterized proteins to derive protein signatures. Collaborating databases include SWISS-PROT, PROSITE, TrEMBL, PRINTS, Propom and Pfam, Smart and TIGRFAMs. Pfam is a large collection of multiple sequence alignments and hidden Markov models covering many common protein domains and families. Pfam is hosted at the Sanger Institute server in the United Kingdom. Interpro is hosted at the European Bioinformatics Institute in the United Kingdom.

[1266] The results of the InterPro scan of the polypeptide sequence as represented by SEQ ID NO: 245 are presented in Table E4.

TABLE E4
InterPro scan results (major accession numbers) of the polypeptide
sequence as represented by SEQ ID NO: 245.

| | | | Amino |
|---|---|---|---|
| | | | acid coordinates |
| | Accession | | on SEQ ID NO 245; |
| Database | number | Accession name | e-value |
| InterPro | IPR001092 | Basic helix-loop-helix | |
| | | dimerisation region | |
| | | bHLH | |
| HMMPfam | PF00010.14 | Helix-loop-helix | T[127-176] 1.6e−06 |
| | | DNA-binding domain | |
| HMMSmart | SM00353 | no description | T[132-181] 1.5e−09 |
| ProfileScan | PS50888 | HLH | T[120-176] 12.451 |
| InterPro | IPR011598 | Helix-loop-helix | |
| | | DNA-binding | |
| superfamily | SSF47459 | Helix-loop-helix | T[122-195] 1.8e−14 |
| | | DNA-binding domain | |

### Example 47

### Topology Prediction of the Polypeptide Sequences Useful in Performing the Methods of the Invention

[1267] TargetP 1.1 predicts the subcellular location of eukaryotic proteins. The location assignment is based on the predicted presence of any of the N-terminal pre-sequences: chloroplast transit peptide (cTP), mitochondrial targeting peptide (mTP) or secretory pathway signal peptide (SP). Scores on which the final prediction is based are not really probabilities, and they do not necessarily add to one. However, the location with the highest score is the most likely according to TargetP, and the relationship between the scores (the reliability class) may be an indication of how certain the prediction is. The reliability class (RC) ranges from 1 to 5, where 1 indicates the strongest prediction. TargetP is maintained at the server of the Technical University of Denmark.

[1268] For the sequences predicted to contain an N-terminal presequence a potential cleavage site can also be predicted.

[1269] A number of parameters were selected, such as organism group (non-plant or plant), cutoff sets (none, predefined set of cutoffs, or user-specified set of cutoffs), and the calculation of prediction of cleavage sites (yes or no).

[1270] The results of TargetP 1.1 analysis of the polypeptide sequence as represented by SEQ ID NO: 245 are presented Table E5. The “plant” organism group has been selected, no cutoffs defined, and the predicted length of the transit peptide requested. The subcellular localization of the polypeptide sequence as represented by SEQ ID NO: 245 may be the cytoplasm or nucleus, no transit peptide is predicted.

TABLE E5
TargetP 1.1 analysis of the polypeptide sequence as
represented by SEQ ID NO: 245

| | |
|---|---|
| Length (AA) | 281 |
| Chloroplastic transit peptide | 0.094 |
| Mitochondrial transit peptide | 0.166 |
| Secretory pathway signal peptide | 0.034 |
| Other subcellular targeting | 0.855 |
| Predicted Location | / |
| Reliability class | 2 |
| Predicted transit peptide length | / |

[1271] When analysed with PLOC (Park and Kanehisa, Bioinformatics, 19, 1656-1663, 2003) or with PSORT (URL: psort.org), the protein is predicted to have a nuclear localisation.

[1272] Many other algorithms can be used to perform such analyses, including:
[1273] ChloroP 1.1 hosted on the server of the Technical University of Denmark;
[1274] Protein Prowler Subcellular Localisation Predictor version 1.2 hosted on the server of the Institute for Molecular Bioscience, University of Queensland, Brisbane, Australia;
[1275] PENCE Proteome Analyst PA-GOSUB 2.5 hosted on the server of the University of Alberta, Edmonton, Alberta, Canada;
[1276] TMHMM, hosted on the server of the Technical University of Denmark;

### Example 48

### Functional Assay for the bHLH11-Like Polypeptide

[1277] A DNA-binding assay for AtbHLH6 is provided in Dombrecht et al. (2007), this approach can be used for any bHLH11-like protein. Briefly, a 1000-bp fragment of the AtbHLH6 coding sequence encompassing codons 285 to 623 was amplified from genomic DNA and cloned into the Nhet-BamHI-digested pTacLCELD6•His vector (Xue, Plant J. 41, 638-649, 2005). The resulting construct encoded the last 338 amino acids of AtbHLH6 (including the bHLH region) in-frame with the reporter protein CelD and a 6×His tag. Correct amplification and cloning were verified by DNA sequencing.

[1278] Determination of the consensus sequence of the MYC2 DNA binding motif and the relative binding affinity of these sites was done according to Xue (2005), wherein a fusion of a DNA-binding protein (DBP) to 6His-tagged cellulase D (GELD) serves both as a means for affinity purification of DBP-DNA complex in the selection of binding sites from a pool of biotinylated random-sequence oligonucleotides and as a reporter for measurement of DNA-binding activity.

[1279] For the selection of binding-sites using cellulose paper as an affinity matrix, DBP-CELD was incubated at room temperature for 1 h with 20 ng of a biotin-labelled Bio-RS-Oligo in 40 μl of binding/washing buffer (described above) containing 1 mM EDTA, 0.25 μg μl⁻¹ poly d(AC-TG), 1 mg ml⁻¹ BSA and 10% glycerol. An appropriate amount of crude DBP-GELD used for binding-site selection was that achieving 20-30% relative cellulose binding efficiency (percentage cellulose activity bound to cellulose after washing). DBP-CELD/Bio-RS-Oligo mixtures were transferred to 96-well microplate wells containing Whatman 1 filter paper (4 mm) which was pre-soaked with 10 μl blocking solution [binding/washing buffer containing 0.5 μg μl⁻¹ poly d(AC-TG) and 10% glycerol]. After incubation at 0° C. for 1 hr with gentle shaking, the cellulose paper was washed six times with binding/washing buffer containing 1 mM EDTA and 0.1 mg ml⁻¹ BSA. The use of extensive washing in the target site selection was based on observations of the relatively high stability of DBP-oligonucleotide complex immobilized on solid matrix. DBP-CELD carrying target binding sites were eluted at 40° C. for 15 min with 40 μl of cellulase eluting buffer [10 mM HEPES, pH7, 50 mM KCl, 0.2 mM EDTA, 4 mM cellobiose, 0.05 mg ml⁻¹ BSA and 10 μg ml⁻¹ of a sense sequence-specific primer SP-S]. The eluate was used for PCR amplification of selected oligonucleotides. The PCR product (0.1 μl) without purification was used for the next round of site selection.

[1280] Alternatively, 6-His tagged DBP-GELD (10-25 μg crude protein) was incubated in 60 μl of PNT buffer (50 mM sodium phosphate, pH8.0, 300 mM NaCl and 0.05% Tween 20) containing 10 mM imidazole and 350 μg Ni-NTA magnetic agarose beads (Qiagen) at room temperature for 45-60 min with gentle shaking in a micro-tube mixer (Torry Seiko Co., Tokyo, Japan). The Ni-NTA magnetic beads were collected at the side of the tubes by placing tubes in a 12-tube magnet (Qiagen). Unbound proteins were removed by washing twice with 150-200 μl of PNT containing 20 mM imidazole and once with 60 μl of binding/washing buffer containing 2 mM MgCl₂, 1 mg ml⁻¹ BSA and 10% glycerol. Washed beads were suspended in 40 μl of binding/washing buffer containing 2 mM MgCl₂, 0.25 μg μl⁻¹ poly d(AC-TG), 1 mg ml⁻¹ BSA, 0.0025% Nonidet P-40, 10% glycerol and biotin-labelled oligonucleotides (50 ng Bio-RS-Oligo or 1 μl of PCR product amplified from previously selected oligonucleotides). The suspension was incubated at room temperature for 1.5 h with gentle shaking in the micro-tube mixer. After washing four times (3-4 min each washing) with 150-200 μl of binding/washing buffer containing 2 mM MgCl₂, 0.1 mg ml⁻¹ BSA and 0.0025% Nonidet P-40, the beads carrying target site-bound BDP-GELD were resuspended in 8 μl of 5 mM Tris-Cl (pH 8.0)/0.5 mM EDTA containing 5 μg ml⁻¹ of a sense sequence-specific primer (SP-S) and the suspension was transferred to a clean tube and used for PCR amplification of selected oligonucleotides. The PCR product (1 μl) without purification was used for the next round of site selection.

[1281] For EMSA assays, 6•His-tagged DBP-GELD proteins were purified using Ni-NTA magnetic agarose beads using a high stringent binding buffer (50 mMsodium phosphate, pH8.0, 1 MNaCl, 10% glycerol, 1% Tween 20 and 10 mM imidazole) and the rest of the procedure followed the manufacturer's instruction. Double-stranded synthetic oligonucleotides (30-45 fmol) labelled with digoxigenin at the 3′-end were incubated with a purified DBP (30-75 ng) in 15 μl of binding buffer [25 mM HEPES/KOH, pH 7.0, 50 mM KCl, 0.5 mM DTT, 2 mM MgCl₂, 0.2 μg μl⁻¹ poly d(AC-TG), 0.3 mg ml⁻¹ BSA and 10% glycerol]. After incubation at room temperature for 30 min, DBP/DNA complexes were separated from free probes on a 6% polyacrylamide gel in a 40-mM Tris-acetate buffer (pH 7.5) containing 5 mM Na acetate, 0.5 mM EDTA and 5% glycerol. The DBP/DNA complexes and free probes in the gels after electrophoresis were transferred to a Hybond N [symbol] membrane. Alkaline phosphatase-conjugated anti-digoxigenin antibody and a chemiluminescent substrate, COP-Star (Roche Diagnostics) was used for detection of digoxigenin according to the manufacturer's instructions.

[1282] Further details are provided in Xue (2005).

### Example 49

### Cloning of the Nucleic Acid Sequence Used in the Methods of the Invention

[1283] The nucleic acid sequence used in the methods of the invention and comprising SEQ ID NO: 244 was amplified by PCR using as template a custom-made Triticum aestivum seedlings cDNA library (in pCMV Sport 6.0; Invitrogen, Paisley, UK). PCR was performed using Hifi Taq DNA polymerase in standard conditions, using 200 ng of template in a 50 μl PCR mix. The primers used were prm009718 (SEQ ID NO: 254; sense, start codon in bold):

5′-ggggacaagtttgtacaaaaaagcaggcttaaacaatggcgggg
canccg-3′

and prm009719 (SEQ ID NO: 255; reverse, complementary):

5′-ggggaccactttgtacaagaaagctgggtatgggtgttgcagct
gctgtt-3′,

which include the AttB sites for Gateway recombination. The amplified PCR fragment was purified also using standard methods. The first step of the Gateway procedure, the BP reaction, was then performed, during which the PCR fragment recombines in vivo with the pDONR201 plasmid to produce, according to the Gateway terminology, an “entry clone”, pbHLH11-like. Plasmid pDONR201 was purchased from Invitrogen, as part of the Gateway® technology.

[1284] The entry clone comprising SEQ ID NO: 244 was then used in an LR reaction with a destination vector used for Oryza sativa transformation. This vector contained as functional elements within the T-DNA borders: a plant selectable marker; a screenable marker expression cassette; and a Gateway cassette intended for LR in vivo recombination with the nucleic acid sequence of interest already cloned in the entry clone. A rice GOS2 promoter (SEQ ID NO: 256) for constitutive expression was located upstream of this Gateway cassette.

[1285] After the LR recombination step, the resulting expression vector pGOS2::bHLH11-like (FIG. 23) was transformed into Agrobacterium strain LBA4044 according to methods well known in the art.

### Example 50

### Plant Transformation

[1286] Transformation of plants was carried out according to the procedure outlined in Example 7.

### Example 51

### Phenotypic Evaluation Procedure

### 51.1 Evaluation Setup

[1287] Approximately 35 independent T0 rice transformants were generated. The primary transformants were transferred from a tissue culture chamber to a greenhouse for growing and harvest of T1 seed. Six events, of which the T1 progeny segregated 3:1 for presence/absence of the transgene, were retained. For each of these events, approximately 10 T1 seedlings containing the transgene (hetero- and homo-zygotes) and approximately 10 T1 seedlings lacking the transgene (nullizygotes) were selected by monitoring visual marker expression. The transgenic plants and the corresponding nullizygotes were grown side-by-side at random positions. Greenhouse conditions were of shorts days (12 hours light), 28° C. in the light and 22° C. in the dark, and a relative humidity of 70%. Plants grown under non-stress conditions are watered at regular intervals to ensure that water and nutrients are not limiting to satisfy plant needs to complete growth and development.

[1288] From the stage of sowing until the stage of maturity the plants were passed several times through a digital imaging cabinet. At each time point digital images (2048×1536 pixels, 16 million colours) were taken of each plant from at least 6 different angles.

### Drought Screen

[1289] Plants from T2 seeds are grown in potting soil under normal conditions until they approach the heading stage. They are then transferred to a “dry” section where irrigation is withheld. Humidity probes are inserted in randomly chosen pots to monitor the soil water content (SWC). When SWC goes below certain thresholds, the plants are automatically re-watered continuously until a normal level is reached again. The plants are then re-transferred again to normal conditions. The rest of the cultivation (plant maturation, seed harvest) is the same as for plants not grown under abiotic stress conditions. Growth and yield parameters are recorded as detailed for growth under normal conditions.

### Nitrogen Use Efficiency Screen

[1290] Rice plants from T2 seeds are grown in potting soil under normal conditions except for the nutrient solution. The pots are watered from transplantation to maturation with a specific nutrient solution containing reduced N nitrogen (N) content, usually between 7 to 8 times less. The rest of the cultivation (plant maturation, seed harvest) is the same as for plants not grown under abiotic stress. Growth and yield parameters are recorded as detailed for growth under normal conditions.

### Salt Stress Screen

[1291] Plants are grown on a substrate made of coco fibers and argex (3 to 1 ratio). A normal nutrient solution are used during the first two weeks after transplanting the plantlets in the greenhouse. After the first two weeks, 25 mM of salt (NaCl) is added to the nutrient solution, until the plants are harvested. Seed-related parameters are then measured.

### 51.2 Statistical Analysis: F Test

[1292] A two factor ANOVA (analysis of variants) was used as a statistical model for the overall evaluation of plant phenotypic characteristics. An F test was carried out on all the parameters measured of all the plants of all the events transformed with the gene of the present invention. The F test was carried out to check for an effect of the gene over all the transformation events and to verify for an overall effect of the gene, also known as a global gene effect. The threshold for significance for a true global gene effect was set at a 5% probability level for the F test. A significant F test value points to a gene effect, meaning that it is not only the mere presence or position of the gene that is causing the differences in phenotype.

### 51.3 Parameters Measured

### Biomass-Related Parameter Measurement

[1293] From the stage of sowing until the stage of maturity the plants were passed several times through a digital imaging cabinet. At each time point digital images (2048×1536 pixels, 16 million colours) were taken of each plant from at least 6 different angles.

[1294] The plant aboveground area (or leafy biomass) was determined by counting the total number of pixels on the digital images from aboveground plant parts discriminated from the background. This value was averaged for the pictures taken on the same time point from the different angles and was converted to a physical surface value expressed in square mm by calibration. Experiments show that the aboveground plant area measured this way correlates with the biomass of plant parts above ground. The above ground area is the area measured at the time point at which the plant had reached its maximal leafy biomass. The early vigour is the plant (seedling) aboveground area three weeks post-germination. Increase in root biomass is expressed as an increase in total root biomass (measured as maximum biomass of roots observed during the lifespan of a plant); or as an increase in the root/shoot index (measured as the ratio between root mass and shoot mass in the period of active growth of root and shoot).

[1295] Early vigour was determined by counting the total number of pixels from aboveground plant parts discriminated from the background. This value was averaged for the pictures taken on the same time point from different angles and was converted to a physical surface value expressed in square mm by calibration. The results described below are for plants three weeks post-germination.

### Seed-Related Parameter Measurements

[1296] The mature primary panicles were harvested, counted, bagged, barcode-labelled and then dried for three days in an oven at 37° C. The panicles were then threshed and all the seeds were collected and counted. The filled husks were separated from the empty ones using an air-blowing device. The empty husks were discarded and the remaining fraction was counted again. The filled husks were weighed on an analytical balance. The number of filled seeds was determined by counting the number of filled husks that remained after the separation step. The total seed yield was measured by weighing all filled husks harvested from a plant. Total seed number per plant was measured by counting the number of husks harvested from a plant. Thousand Kernel Weight (TKW) is extrapolated from the number of filled seeds counted and their total weight. The Harvest Index (HI) in the present invention is defined as the ratio between the total seed yield and the above ground area (mm²), multiplied by a factor 10⁶. The total number of flowers per panicle as defined in the present invention is the ratio between the total number of seeds and the number of mature primary panicles. The seed fill rate as defined in the present invention is the proportion (expressed as a %) of the number of filled seeds over the total number of seeds (or florets).

### Example 52

### Results of the Phenotypic Evaluation of the Transgenic Plants

[1297] The results of the evaluation of transgenic rice plants expressing a bHLH11-like nucleic acid under non-stress conditions are presented below. An increase of more than 5% in at least 2 lines was observed for total seed yield, number of filled seeds, fill rate, harvest index, number of first panicles and of at least 3% for thousand kernel weight. Data on the overall increase (measured over all tested lines) for each parameter are presented in Table E6:

TABLE E6

| Parameter | Overall increase (%) |
|---|---|
| Total weight of seeds (total seed yield) | 20 |
| Number of filled seeds | 20 |
| Fill rate | 18 |
| Harvest Index | 21 |

### VI. ASR (Abscisic Acid-, Stress-, and Ripening-Induced) Protein

### Example 53

### Identification of Sequences Related to the ASR Nucleic Acid Sequence Used in the Methods of the Invention

[1298] Sequences (full length cDNA, ESTs or genomic) related to the nucleic acid sequence used in the methods of the present invention were identified amongst those maintained in the Entrez Nucleotides database at the National Center for Biotechnology Information (NCBI) using database sequence search tools, such as the Basic Local Alignment Tool (BLAST) (Altschul et al. (1990) J. Mol. Biol. 215:403-410; and Altschul et al. (1997) Nucleic Acids Res. 25:3389-3402). The program was used to find regions of local similarity between sequences by comparing nucleic acid or polypeptide sequences to sequence databases and by calculating the statistical significance of matches. For example, the polypeptide encoded by the nucleic acid used in the present invention were used for the TBLASTN algorithm, with default settings and the filter to ignore low complexity sequences set off. The output of the analysis was viewed by pairwise comparison, and ranked according to the probability score (E-value), where the score reflects the probability that a particular alignment occurs by chance (the lower the E-value, the more significant the hit). In addition to E-values, comparisons were also scored by percentage identity. Percentage identity refers to the number of identical nucleotides (or amino acids) between the two compared nucleic acid (or polypeptide) sequences over a particular length.

[1299] Table F1 provides a list of nucleic acid and polypeptide sequences related to the nucleic acid sequence used in the methods of the present invention.

TABLE F1
Examples of ASR nucleic acids and polypeptides.

| | | Nucleic acid | Protein |
|---|---|---|---|
| Name | Plant origin | SEQ ID NO: | SEQ ID NO: |
| Orysa_ASR_1 | Oryza sativa | 396 | 397 |
| Zeama_ASR_1 | Zea mays | 401 | 402 |
| Zeama_ASR_2 | Zea mays | 403 | 404 |
| Zeama_ASR_3 | Zea mays | 405 | 406 |
| Zeama_ASR_4 | Zea mays | 407 | 408 |
| Zeama_ASR_5 | Zea mays | 409 | 410 |
| Zeama_ASR_6 | Zea mays | 411 | 412 |
| Zeama_ASR_7 | Zea mays | 413 | 414 |
| Zeama_ASR_8 | Zea mays | 415 | 416 |
| Zeama_ASR_9 | Zea mays | 417 | 418 |
| Lyces_ASR_1 | Lycopersicon esculentum | 419 | 420 |
| Lyces_ASR_2 | Lilium longiflorum | 421 | 422 |
| Sacof_ASR_1 | Saccharum officinarum | 423 | 424 |
| Zeama_ASR_10 | Zea mays | 425 | 426 |

### Example 54

### Alignment of ASR Polypeptide Sequences

[1300] Alignment of polypeptide sequences is performed using the AlignX programme from the Vector NTI package (Invitrogen) which is based on the popular Cluster W algorithm of progressive alignment (Thompson et al. (1997) Nucleic Acids Res 25:4876-4882; Chema et al. (2003). Nucleic Acids Res 31:3497-3500). Default values are for the gap open penalty of 10, for the gap extension penalty of 0,1 and the selected weight matrix is Blosum 62 (if polypeptides are aligned). Minor manual editing may be done to further optimise the alignment.

[1301] A phylogenetic tree of GRP polypeptides is constructed using a neighbour-joining clustering algorithm as provided in the AlignX programme from Vector NTI (Invitrogen).

### Example 55

### Calculation of Global Percentage Identity Between ASR Polypeptide Sequences Useful in Performing the Methods of the Invention

[1302] Global percentages of similarity and identity between full length polypeptide sequences useful in performing the methods of the invention are determined using one of the methods available in the art, the MatGAT (Matrix Global Alignment Tool) software (BMC Bioinformatics. 2003 4:29. MatGAT: an application that generates similarity/identity matrices using protein or DNA sequences. Campanella J J, Bitincka L, Smalley J; software hosted by Ledion Bitincka). MatGAT software generates similarity/identity matrices for DNA or protein sequences without needing pre-alignment of the data. The program performs a series of pair-wise alignments using the Myers and Miller global alignment algorithm (with a gap opening penalty of 12, and a gap extension penalty of 2), calculates similarity and identity using for example Blosum 62 (for polypeptides), and then places the results in a distance matrix. Sequence similarity is shown in the bottom half of the dividing line and sequence identity is shown in the top half of the diagonal dividing line.

[1303] Parameters used in the comparison were:
[1304] Scoring matrix: Blosum62
[1305] First Gap: 12
[1306] Extending gap: 2

[1307] A MATGAT table for local alignment of a specific domain, or data on % identity/similarity between specific domains may also be generated.

### Example 56

### Identification of Domains Comprised in ASR Polypeptide Sequences Useful in Performing the Methods of the Invention

[1308] The Integrated Resource of Protein Families, Domains and Sites (InterPro) database is an integrated interlace for the commonly used signature databases for text- and sequence-based searches. The InterPro database combines these databases, which use different methodologies and varying degrees of biological information about well-characterized proteins to derive protein signatures. Collaborating databases include SWISS-PROT, PROSITE, TrEMBL, PRINTS, Propom and Pfam, Smart and TIGRFAMs. Pfam is a large collection of multiple sequence alignments and hidden Markov models covering many common protein domains and families. Pfam is hosted at the Sanger Institute server in the United Kingdom. Interpro is hosted at the European Bioinformatics Institute in the United Kingdom.

[1309] The protein sequences representing the GRP are used as query to search the InterPro database.

### Example 57

### Topology Prediction of ASR Polypeptide Sequences Useful in Performing the Methods of the Invention

[1310] TargetP 1.1 predicts the subcellular location of eukaryotic proteins. The location assignment is based on the predicted presence of any of the N-terminal pre-sequences: chloroplast transit peptide (cTP), mitochondrial targeting peptide (mTP) or secretory pathway signal peptide (SP). Scores on which the final prediction is based are not really probabilities, and they do not necessarily add to one. However, the location with the highest score is the most likely according to TargetP, and the relationship between the scores (the reliability class) may be an indication of how certain the prediction is. The reliability class (RC) ranges from 1 to 5, where 1 indicates the strongest prediction. TargetP is maintained by the Technical University of Denmark.

[1311] For the sequences predicted to contain an N-terminal presequence a potential cleavage site can also be predicted.

[1312] A number of parameters were selected, such as organism group (non-plant or plant), cutoff sets (none, predefined set of cutoffs, or user-specified set of cutoffs), and the calculation of prediction of cleavage sites (yes or no).

[1313] The protein sequences representing the GRP are used to query TargetP 1.1. The “plant” organism group is selected, no cutoffs defined, and the predicted length of the transit peptide requested.

[1314] Many other algorithms can be used to perform such analyses, including:
[1315] ChloroP 1.1 hosted on the server of the Technical University of Denmark;
[1316] Protein Prowler Subcellular Localisation Predictor version 1.2 hosted on the server of the Institute for Molecular Bioscience, University of Queensland, Brisbane, Australia;
[1317] PENCE Proteome Analyst PA-GOSUB 2.5 hosted on the server of the University of Alberta, Edmonton, Alberta, Canada;
[1318] TMHMM, hosted on the server of the Technical University of Denmark

### Example 58

### Cloning of an ASR Nucleic Acid Sequence Used in the Methods of the Invention

### Cloning of SEQ ID NO: 396:

[1319] The nucleic acid sequence SEQ ID NO: 396 used in the methods of the invention was amplified by PCR using as template a custom-made Oryza sativa seedlings cDNA library (in pCMV Sport 6.0; Invitrogen, Paisley, UK). PCR was performed using Hifi Taq DNA polymerase in standard conditions, using 200 ng of template in a 50 μl PCR mix. The primers used were prm06442 (SEQ ID NO: 399; sense, start codon in bold):
[1320] 5′-ggggacaagtttgtacaaaaaagcaggcttaaacaatggcggaggagaagca-3′
   and prm06443 (SEQ ID NO: 400; reverse, complementary):
[1321] 5′-ggggaccactttgtacaagaaagctgggtcggcgacgttgtgatga-3%
   which include the AttB sites for Gateway recombination. The amplified PCR fragment was purified also using standard methods. The first step of the Gateway procedure, the BP reaction, was then performed, during which the PCR fragment recombines in vivo with the pDONR201 plasmid to produce, according to the Gateway terminology, an “entry clone”. Plasmid pDONR201 was purchased from Invitrogen, as part of the Gateway® technology.

[1322] The entry clone comprising SEQ ID NO: 396 was then used in an LR reaction with a destination vector used for Oryza sativa transformation. This vector contained as functional elements within the T-DNA borders: a plant selectable marker; a screenable marker expression cassette; and a Gateway cassette intended for LR in vivo recombination with the nucleic acid sequence of interest already cloned in the entry clone. A rice GOS2 promoter (SEQ ID NO: 398) for seed specific expression was located upstream of this Gateway cassette.

[1323] After the LR recombination step, the resulting expression vector pGOS2::GRP (FIG. 25) was transformed into Agrobacterium strain LBA4044 according to methods well known in the art.

### Example 59

### Plant Transformation

[1324] Transformation of plants was carried out according to the procedure outlined in Example 7

### Example 60

### Phenotypic Evaluation Procedure

### 60.1 Evaluation Setup

[1325] Approximately 35 independent T0 rice transformants were generated. The primary transformants were transferred from a tissue culture chamber to a greenhouse for growing and harvest of T1 seed. Six events, of which the T1 progeny segregated 3:1 for presence/absence of the transgene, were retained. For each of these events, approximately 10 T1 seedlings containing the transgene (hetero- and homo-zygotes) and approximately 10 T1 seedlings lacking the transgene (nullizygotes) were selected by monitoring visual marker expression. The transgenic plants and the corresponding nullizygotes were grown side-by-side at random positions. Greenhouse conditions were of shorts days (12 hours light), 28° C. in the light and 22° C. in the dark, and a relative humidity of 70%.

[1326] Four T1 events were further evaluated in the T2 generation following the same evaluation procedure as for the T1 generation but with more individuals per event.

[1327] From the stage of sowing until the stage of maturity the plants were passed several times through a digital imaging cabinet. At each time point digital images (2048×1536 pixels, 16 million colours) were taken of each plant from at least 6 different angles.

### Drought Screen

[1328] Plants from T2 seeds are grown in potting soil under normal conditions until they approached the heading stage. They are then transferred to a “dry” section where irrigation is withheld. Humidity probes are inserted in randomly chosen pots to monitor the soil water content (SWC). When SWC goes below certain thresholds, the plants are automatically re-watered continuously until a normal level is reached again. The plants are then re-transferred again to normal conditions. The rest of the cultivation (plant maturation, seed harvest) is the same as for plants not grown under abiotic stress conditions. Growth and yield parameters are recorded as detailed for growth under normal conditions. Plants grown under non-stress conditions are supplied with water at regular intervals to ensure that water and nutrients are not limiting to satisfy plant needs to complete growth and development.

### Nitrogen Use Efficiency Screen

[1329] Rice plants from T2 seeds are grown in potting soil under normal conditions except for the nutrient solution. The pots are watered from transplantation to maturation with a specific nutrient solution containing reduced N nitrogen (N) content, usually between 7 to 8 times less. The rest of the cultivation (plant maturation, seed harvest) is the same as for plants not grown under abiotic stress. Growth and yield parameters are recorded as detailed for growth under normal conditions.

### 60.2 Statistical Analysis: F Test

[1330] A two factor ANOVA (analysis of variants) was used as a statistical model for the overall evaluation of plant phenotypic characteristics. An F test was carried out on all the parameters measured of all the plants of all the events transformed with the gene of the present invention. The F test was carried out to check for an effect of the gene over all the transformation events and to verify for an overall effect of the gene, also known as a global gene effect. The threshold for significance for a true global gene effect was set at a 5% probability level for the F test. A significant F test value points to a gene effect, meaning that it is not only the mere presence or position of the gene that is causing the differences in phenotype.

[1331] Because two experiments with overlapping events were carried out, a combined analysis is performed. This is useful to check consistency of the effects over the two experiments, and if this is the case, to accumulate evidence from both experiments in order to increase confidence in the conclusion. The method used is a mixed-model approach that takes into account the multilevel structure of the data (i.e. experiment—event—segregants). P values were obtained by comparing likelihood ratio test to chi square distributions.

### 60.3 Parameters Measured

### Biomass-Related Parameter Measurement

[1332] The plant aboveground area (or leafy biomass) was determined by counting the total number of pixels on the digital images from aboveground plant parts discriminated from the background. This value was averaged for the pictures taken on the same time point from the different angles and was converted to a physical surface value expressed in square mm by calibration. Experiments show that the aboveground plant area measured this way correlates with the biomass of plant parts above ground. The above ground area is the area measured at the time point at which the plant had reached its maximal leafy biomass.

### Seed-Related Parameter Measurements

[1333] The mature primary panicles were harvested, counted, bagged, barcode-labelled and then dried for three days in an oven at 37° C. The panicles were then threshed and all the seeds were collected and counted. The filled husks were separated from the empty ones using an air-blowing device. The empty husks were discarded and the remaining fraction was counted again. The filled husks were weighed on an analytical balance. The number of filled seeds was determined by counting the number of filled husks that remained after the separation step. The total seed yield was measured by weighing all filled husks harvested from a plant. Total seed number per plant was measured by counting the number of husks harvested from a plant. Thousand Kernel Weight (TKW) is extrapolated from the number of filled seeds counted and their total weight. The Harvest Index (HI) in the present invention is defined as the ratio between the total seed yield and the above ground area (mm²), multiplied by a factor 10⁶. The total number of flowers per panicle as defined in the present invention is the ratio between the total number of seeds and the number of mature primary panicles. The seed fill rate as defined in the present invention is the proportion (expressed as a %) of the number of filled seeds over the total number of seeds (or florets).

### Example 61

### Results of the Phenotypic Evaluation of the Transgenic Plants

[1334] The transgenic rice plants expressing the GRP nucleic acid represented by SEQ ID NO: 396 under control of the GOS2 promoter showed an increase of more than 5% for total weight of seeds, number of filled seeds, and harvest index, when grown under non-stress conditions.

### VII. Squamosa Promoter Binding Protein-Like 11 (SPL11)

### Example 62

### Identification of Sequences Related to the SPL 11 Nucleic Acid Sequence Used in the Methods of the Invention

[1335] Sequences (full length cDNA, ESTs or genomic) related to the nucleic acid sequence used in the methods of the present invention were identified amongst those maintained in the Entrez Nucleotides database at the National Center for Biotechnology Information (NCBI). The sequences search was also carried out in other public and proprietary databases. Sequence search tools were used, such as the Basic Local Alignment Tool (BLAST) (Altschul et al. (1990) J. Mol. Biol. 215:403-410; and Altschul et al. (1997) Nucleic Acids Res. 25:3389-3402). The program is used to find regions of local similarity between sequences by comparing nucleic acid or polypeptide sequences to sequence databases and by calculating the statistical significance of matches. For example, the polypeptide encoded by the nucleic acid used in the present invention was used for the TBLASTN algorithm, with default settings and the filter to ignore low complexity sequences set off. The output of the analysis was viewed by pairwise comparison, and ranked according to the probability score (E-value), where the score reflect the probability that a particular alignment occurs by chance (the lower the E-value, the more significant the hit). In addition to E-values, comparisons were also scored by percentage identity. Percentage identity refers to the number of identical nucleotides (or amino acids) between the two compared nucleic acid (or polypeptide) sequences over a particular length. In some instances, the default parameters may be adjusted to modify the stringency of the search. For example the E-value may be increased to show less stringent matches. This way, short nearly exact matches may be identified.

[1336] Table G1 provides a list of nucleic acid sequences related to the nucleic acid sequence used in the methods of the present invention. Polypeptides with an accession extended by a dot and one digit represent splice variants.

TABLE G1
Examples of SPL11 nucleic acids and polypeptides

| | | | Nucleic acid | Protein SEQ |
|---|---|---|---|---|
| Name | Alias | Plant origin | SEQ ID NO: | ID NO: |
| Arath_SPL11a | At1g27360 | Arabidopsis thaliana | 427 | 428 |
| Arath_SPL11aa | NM_202191 | Arabidopsis thaliana | 429 | 428 |
| | (splicing variant) | | | |
| Arath_SPL11aaa | NM_001084135 | Arabidopsis thaliana | 430 | 428 |
| Arath_SPL11aaaa | SEQID NO: 1 Variant | Synthetic | 431 | 428 |
| | MiR156 insensitive | | | |
| Arath_SPL11b | At1g27370 | Arabidopsis thaliana | 432 | 433 |
| Arath_SPL11c | At5g43270 | Arabidopsis thaliana | 434 | 435 |
| Orysa_SPL11a | LOC_Os02g04680 | Oryza sativa | 436 | 437 |
| Orysa_SPL11b | LOC_Os06g49010 | Oryza sativa | 438 | 439 |
| Popth_SPL11a | Populus SPL11a | Populus Species | 440 | 441 |
| Popth_SPL11b | Populus SPL11b | Populus Species | 442 | 443 |
| Popth_SPL11c | Populus SPL11c | Populus Species | 444 | 445 |
| Brara_SPL11a | Br_AC189413 | Brassica rapa | 446 | 447 |
| Zeama_SPL11a | ZM_60752693 | Zea mays | 448 | 449 |
| Zeama_SPL11b | ZM_SPL11b | Zea mays | 450 | 451 |
| Triae_SPL11a | Ta_SPL11a | Triticum aestivum | 452 | 453 |
| Vitvi_SPL11a | Vv_SPL11a | Vitis vinifera | 454 | 455 |

### Example 63

### Alignment of SPL11 Polypeptide Sequences

[1337] Alignment of polypeptide sequences was performed using the AlignX programme from the Vector NTI (Invitrogen) which is based on the popular Clustal W algorithm of progressive alignment (Thompson et al. (1997) Nucleic Acids Res 25:4876-4882; Chema et al. (2003). Nucleic Acids Res 31:3497-3500). Default values are for the gap open penalty of 10, for the gap extension penalty of 0,1 and the selected weight matrix is Blosum 62 (if polypeptides are aligned). Minor manual editing was done to further optimise the alignment. A consensus sequence comprising highly conserved representative amino acids at each position is given; blanks in between given amino acids in the consensus sequence represent any amino acid. High sequence conservation among SPL11 polypeptides is observed mostly along the SBP domain of the polypeptides. The position of other conserved sequence motifs outside of the SBP domain herein represented by Motif 1 to Motif 4 (SEQ ID NO: 466 to SEQ ID NO: 472) is indicated over the consensus sequence.

[1338] FIG. 28 provides an alignment of representative SPL11 polypeptides.

### Example 64

### Calculation of Global Percentage Identity Between SPL11 Polypeptide Sequences Useful in Performing the Methods of the Invention

[1339] Global percentages of similarity and identity between full length polypeptide sequences useful in performing the methods of the invention were determined using one of the methods available in the art, the MatGAT (Matrix Global Alignment Tool) software (BMC Bioinformatics. 2003 4:29. MatGAT: an application that generates similarity/identity matrices using protein or DNA sequences. Campanella J J, Bitincka L, Smalley J; software hosted by Ledion Bitincka). MatGAT software generates similarity/identity matrices for DNA or protein sequences without needing pre-alignment of the data. The program performs a series of pair-wise alignments using the Myers and Miller global alignment algorithm (with a gap opening penalty of 12, and a gap extension penalty of 2), calculates similarity and identity using for example Blosum 62 (for polypeptides), and then places the results in a distance matrix. Sequence similarity is shown in the bottom half of the dividing line and sequence identity is shown in the top half of the diagonal dividing line.

[1340] Parameters used in the comparison were:
[1341] Scoring matrix: Blosum62
[1342] First Gap: 12
[1343] Extending gap: 2

[1344] Results of the software analysis are shown in Table G2 for the global similarity and identity over the full length of the polypeptide sequences and Table G3 for the similarity on the SBP domain. Percentage identity is given above the diagonal in bold and percentage similarity is given below the diagonal (normal face).

[1345] The percentage identity between the SPL11 polypeptide sequences useful in performing the methods of the invention can be as low as 20% amino acid identity compared to SEQ ID NO: 428. Typically, SPL11 polypeptides have a global (along the sequence of the entire polypeptide) sequence identity in the range of 40%.

[1346] The percentage identity between SBP domains comprised in SPL11 polypeptide sequences useful in performing the methods of the invention can be as low as 30% amino acid identity compared to SEQ ID NO: 456 (SBP domain comprised in Arath_SPL11a or SEQ ID NO: 428). The SBP domains comprised in the SPL11 polypeptides given in Table G1 have a sequence identity in the range of 31 to 93.6%.

TABLE G2
MatGAT results for global similarity and identity over the full length of the
polypeptide sequences.

| Name sequence | 1 | 2 | 3 | 4 | 5 | 6 | 7 | 8 | 9 | 10 | 11 | 12 | 13 |
|---|---|---|---|---|---|---|---|---|---|---|---|---|---|
| 1. Arath_SPL11a | | 75.3 | 37.2 | 31.2 | 30.9 | 38.4 | 34.3 | 29.9 | 31 | 27.5 | 30.7 | 31.4 | 31.5 |
| 2. Arath_SPL11b | 82.3 | | 36.6 | 33.2 | 32.1 | 37.9 | 36.4 | 29.7 | 31.3 | 29.5 | 30.7 | 31.2 | 33.2 |
| 3. Arath_SPL11c | 52.5 | 52 | | 33.6 | 34.9 | 40.4 | 38.6 | 33.7 | 48.5 | 32.9 | 31.8 | 32.4 | 34.4 |
| 4. Orysa_SPL11a | 46.5 | 44.6 | 46.7 | | 54.3 | 36.6 | 38.9 | 38.1 | 25.6 | 46.9 | 49.2 | 66.2 | 34.5 |
| 5. Orysa_SPL11b | 43.8 | 43.4 | 47.8 | 68.2 | | 35.4 | 36.7 | 38.4 | 25.2 | 44.3 | 55.1 | 55.2 | 32.6 |
| 6. Popth_SPL11a | 54.5 | 52 | 54.7 | 49 | 49.1 | | 66.5 | 35.4 | 36.4 | 30 | 32.3 | 35.4 | 44.1 |
| 7. Popth_SPL11b | 46.7 | 48.6 | 52.3 | 55.9 | 53.9 | 71.2 | | 37.7 | 32.7 | 30.7 | 34.7 | 37 | 42.5 |
| 8. Popth_SPL11c | 44.7 | 44.7 | 50.4 | 55.9 | 55.6 | 48.9 | 55.7 | | 25.8 | 33.3 | 34.2 | 35.7 | 37.6 |
| 9. Brara_SPL11a | 41.7 | 42.4 | 55.6 | 34.1 | 34.3 | 46.6 | 40 | 35.2 | | 22.2 | 24.1 | 24.8 | 29.4 |
| 10. Zeama_SPL11a | 42.1 | 42.5 | 44.6 | 61.4 | 58.3 | 42.7 | 45.9 | 51 | 31.5 | | 41.6 | 49.4 | 28.6 |
| 11. Zeama_SPL11b | 44.2 | 44.4 | 46.7 | 60.6 | 66.7 | 47.6 | 50.5 | 50.4 | 35.1 | 53.1 | | 49.5 | 32.1 |
| 12. Triae_SPL11a | 44 | 44 | 46.3 | 77 | 69.5 | 48 | 52 | 53.9 | 33.2 | 62.2 | 61.1 | | 32.8 |
| 13. Vitvi_SPL11a | 44.6 | 43.5 | 47.2 | 50.2 | 50.4 | 53.8 | 55.8 | 55.8 | 36.7 | 46.4 | 46.4 | 50.2 | |

TABLE G3
MatGAT results for similarity and identity over the SBP domain of polypeptide
sequences.

| Name sequence | 1 | 2 | 3 | 4 | 5 | 6 | 7 | 8 | 9 | 10 | 11 | 12 |
|---|---|---|---|---|---|---|---|---|---|---|---|---|
| 1. Arath_SPL11a | | 93.7 | 77.2 | 73.4 | 75.9 | 58.3 | 62.2 | 49.5 | 46.6 | 73.4 | 73.4 | 68.2 |
| 2. Arath_SPL11b | 96.2 | | 79.7 | 73.4 | 73.4 | 59.3 | 63.3 | 49.5 | 48.9 | 75.9 | 77.2 | 71.8 |
| 3. Arath_SPL11c | 86.1 | 88.6 | | 81 | 77.2 | 63 | 66.3 | 54.2 | 59.1 | 81 | 78.5 | 74.1 |
| 4. Orysa_SPL11a | 84.8 | 86.1 | 89.9 | | 84.8 | 61.5 | 66.3 | 53.3 | 50 | 88.6 | 83.5 | 80 |
| 5. Orysa_SPL11b | 88.6 | 91.1 | 91.1 | 91.1 | | 59.3 | 64.3 | 50.5 | 47.7 | 87.3 | 83.5 | 78.8 |
| 6. Popth_SPL11a | 64.8 | 67.6 | 68.5 | 65.7 | 66.7 | | 60.6 | 52 | 45.4 | 62.4 | 57.4 | 60.2 |
| 7. Popth_SPL11b | 69.4 | 72.4 | 72.4 | 70.4 | 72.4 | 71.3 | | 45.2 | 41.3 | 66.3 | 62.2 | 61.5 |
| 8. Popth_SPL11c | 63.3 | 64.3 | 65.3 | 64.3 | 66.3 | 66.7 | 65.3 | | 31 | 53.3 | 50.5 | 56.1 |
| 9. Brara_SPL11a | 62 | 64.6 | 68.4 | 63.3 | 64.6 | 56.5 | 55.1 | 43.9 | | 51.1 | 51.2 | 46.8 |
| 10. Zeama_SPL11a | 86.1 | 88.6 | 91.1 | 93.7 | 96.2 | 66.7 | 70.4 | 67.3 | 63.3 | | 88.6 | 84.7 |
| 11. Zeama_SPL11b | 88.6 | 91.1 | 89.9 | 88.6 | 93.7 | 63.9 | 69.4 | 64.3 | 64.6 | 92.4 | | 90.6 |
| 12. Triae_SPL11a | 82.4 | 84.7 | 84.7 | 84.7 | 88.2 | 67.6 | 72.4 | 71.4 | 60 | 88.2 | 90.6 | |
| 13. Vitvi_SPL11a | 90.1 | 93.8 | 90.1 | 87.7 | 90.1 | 70.4 | 75.5 | 67.3 | 64.2 | 88.9 | 87.7 | 87.1 |

### Example 65

### Identification of Domains Comprised in Polypeptide Sequences Useful in Performing the Methods of the Invention

[1347] The Integrated Resource of Protein Families, Domains and Sites (InterPro) database is an integrated interface for the commonly used signature databases for text- and sequence-based searches. The InterPro database combines these databases, which use different methodologies and varying degrees of biological information about well-characterized proteins to derive protein signatures. Collaborating databases include SWISS-PROT, PROSITE, TrEMBL, PRINTS, Propom and Pfam, Smart and TIGRFAMs. Pram is a large collection of multiple sequence alignments and hidden Markov models covering many common protein domains and families. Pfam is hosted at the Sanger Institute server in the United Kingdom. Interpro is hosted at the European Bioinformatics Institute in the United Kingdom.

[1348] Table G4 shows the settings (Gathering cut off, trusted cut off and noise cut off) as described in the Pfam database that were used to build the HMMs_fs for SBP different domains.

TABLE G4
HMMs_build information in domain database Pfam Version 21.0

| HMMER | Pfam_ls | |
|---|---|---|
| build information | [Download HMM] | Pfam_fs [Download HMM] |
| Gathering cutoff | 25.0 25.0; | 25.0 25.0 |
| Trusted cutoff | 41.4 41.4; | 26.2 54.1 |
| Noise cutoff | 20.8 20.8; | 18.0 11.2 |
| Build method of | hmmbuild -F | hmmbuild -f -F HMM_fs SEED |
| HMM | HMM_ls SEED | hmmcalibrate --seed 0 HMM_fs |
| | hmmcalibrate --seed | |
| | 0 HMM_ls | |

[1349] The results of the Pfam scan for representative SPL11 polypeptides of plant origin are presented in Table G5. The amino acid coordinates for SBP domain in the sequence of reference is indicated in the corresponding column. The E-value of the alignment is also given.

TABLE G5
Pfam scan results for the SBP domain (Pfam Reference PF03110)
of representative SPL11 polypeptides as perform on Pfam Version 21.0.

| | Amino acid coordinates | e-value of the |
|---|---|---|
| Name sequence | of the SBP domain | alignment |
| Arath_SPL11a | 174-252 | 1.10E−50 |
| Arath_SPL11b | 175-253 | 1.61E−47 |
| Arath_SPL11c | 168-246 | 1.90E−52 |
| Orysa_SPL11a | 181-259 | 5.10E−50 |
| Orysa_SPL11b | 179-257 | 3.90E−47 |
| Popth_SPL11a | 170-277 | 170-277 |
| Popth_SPL11b | 180-277 | 1.50E−41 |
| Popth_SPL11c | 171-249 | 7.80E−52 |
| Brara_SPL11a | 180-279 | 5.20E−44 |
| Zeama_SPL11a | 161-239 | 2.20E−51 |
| Zeama_SPL11b | 159-237 | 1.10E−48 |
| Triae_SPL11a | 184-262 | 2.90E−52 |
| Vitvi_SPL11a | 171-249 | 7.80E−52 |

### Example 66

### Cloning of the Nucleic Acid Sequence Used in the Methods of the Invention

[1350] The nucleic acid sequence used in the methods of the invention was amplified by PCR using as template a custom-made Arabidopsis thaliana seedlings cDNA library (in pCMV Sport 6.0; Invitrogen, Paisley, UK). PCR was performed using Hifi Taq DNA polymerase in standard conditions, using 200 ng of template in a 50 μl PCR mix. An upstream and downstream primer as represented by SEQ ID NO: 473 and SEQ ID NO: 474 respectively were used to amplify by PCR (Polymerase Chain Reaction) the coding region of a SPL11 nucleic acid as represented by SEQ ID NO: 427. The primers include the AttB sites for Gateway recombination to facilitate the cloning of the amplified PCR DNA fragment into a Gateway cloning vector.

[1351] The amplified PCR fragment was purified also using standard methods. The first step of the Gateway procedure, the BP reaction, was then performed, during which the PCR fragment recombines in vivo with the pDONR201 plasmid to produce, according to the Gateway terminology, an “entry clone”, pSPL11. Plasmid pDONR201 was purchased from Invitrogen, as part of the Gateway® technology.

[1352] The entry clone comprising SEQ ID NO: 427 was then used in an LR reaction with a destination vector used for Oryza sativa transformation. This vector contained as functional elements within the T-DNA borders: a plant selectable marker; a screenable marker expression cassette; and a Gateway cassette intended for LR in vivo recombination with the nucleic acid sequence of interest already cloned in the entry clone. A rice GOS2 promoter (SEQ ID NO: 476) for constitutive expression was located upstream of this Gateway cassette in the vector pGOS2::SPL11. The SPL11 coding sequence was also cloned in an expression vector comprising a rice WSI18 promoter (SEQ ID NO: 477) for seed specific (ABA inducible) expression (pWSI18::SPL11).

[1353] After the LR recombination step, the resulting expression vectors pGOS2::SPL11 and pWSI18::SPL11 (FIG. 31) were transformed into Agrobacterium strain LBA4044 according to methods well known in the art.

### Example 67

### Plant Transformation

[1354] Transformation of plants was carried out according to the procedure outlined in Example 7

### Example 68

### Phenotypic Evaluation Procedure

### 68.1 Evaluation Setup

[1355] Approximately 35 independent T0 rice transformants were generated. The primary transformants were transferred from a tissue culture chamber to a greenhouse for growing and harvest of T1 seed. Six events, of which the T1 progeny segregated 3:1 for presence/absence of the transgene, were retained. For each of these events, approximately 10 T1 seedlings containing the transgene (hetero- and homo-zygotes) and approximately 10 T1 seedlings lacking the transgene (nullizygotes) were selected by monitoring visual marker expression. The transgenic plants and the corresponding nullizygotes were grown side-by-side at random positions. Greenhouse conditions were of shorts days (12 hours light), 28° C. in the light and 22° C. in the dark, and a relative humidity of 70%. Plants grown under non-stress conditions are supplied with water at regular intervals to ensure that water and nutrients are not limiting to satisfy plant needs to complete growth and development.

[1356] Four T1 events were further evaluated in the T2 generation following the same evaluation procedure as for the T1 generation but with more individuals per event. From the stage of sowing until the stage of maturity the plants were passed several times through a digital imaging cabinet. At each time digital images (2048×1536 pixels, 16 million colours) were taken of each plant from at least 6 different angles.

### Drought Screen

[1357] Plants from T2 seeds were grown in potting soil under normal conditions until they approached the heading stage. They were then transferred to a “dry” section where irrigation was withheld. Humidity probes were inserted in randomly chosen pots to monitor the soil water content (SWC). When SWC went below certain thresholds, the plants were automatically re-watered continuously until a normal level was reached again. The plants were then re-transferred again to normal conditions. The rest of the cultivation (plant maturation, seed harvest) was the same as for plants not grown under abiotic stress conditions. Growth and yield parameters are recorded as detailed for growth under normal conditions.

### Nitrogen Use Efficiency Screen

[1358] Rice plants from T2 seeds are grown in potting soil under normal conditions except for the nutrient solution. The pots are watered from transplantation to maturation with a specific nutrient solution containing reduced N nitrogen (N) content, usually between 7 to 8 times less. The rest of the cultivation (plant maturation, seed harvest) is the same as for plants not grown under abiotic stress. Growth and yield parameters are recorded as detailed for growth under normal conditions.

### 68.2 Statistical Analysis: F Test

[1359] A two factor ANOVA (analysis of variants) was used as a statistical model for the overall evaluation of plant phenotypic characteristics. An F test was carried out on all the parameters measured of all the plants of all the events transformed with the gene of the present invention. The F test was carried out to check for an effect of the gene over all the transformation events and to verify for an overall effect of the gene, also known as a global gene effect. The threshold for significance for a true global gene effect was set at a 5% probability level for the F test. A significant F test value to a gene effect, meaning that it is not only the mere presence or position of the gene that is causing the differences in phenotype.

[1360] When two experiments with overlapping events were carried out, a combined analysis was performed. This is useful to check consistency of the effects over the two experiments, and if this is the case, to accumulate evidence from both experiments in order to increase confidence in the conclusion. The method used was a mixed-model approach that takes into account the multilevel structure of the data (i.e. experiment—event—segregants). P values were obtained by comparing likelihood ratio test to chi square distributions.

### 68.3 Parameters Measured

### Biomass-Related Parameter Measurement

[1361] From the stage of sowing until the stage of maturity the plants were passed several times through a digital imaging cabinet. At each time digital images (2048×1536 pixels, 16 million colours) were taken of each plant from at least 6 different angles.

[1362] The plant aboveground area (or leafy biomass) was determined by counting the total number of pixels on the digital images from aboveground plant parts discriminated from the background. This value was averaged for the pictures taken on the same time from the different angles and was converted to a physical surface value expressed in square mm by calibration. Experiments show that the aboveground plant area measured this way correlates with the biomass of plant parts above ground. The above ground area is the area measured at the time at which the plant had reached its maximal leafy biomass. The early vigour is the plant (seedling) aboveground area three weeks post-germination. Increase in root biomass is expressed as an increase in total root biomass (measured as maximum biomass of roots observed during the lifespan of a plant); or as an increase in the root/shoot index (measured as the ratio between root mass and shoot mass in the period of active growth of root and shoot).

[1363] Emergence vigour was determined by counting the total number of pixels from aboveground plant parts discriminated from the background. This value was averaged for the pictures taken on the same time from different angles and was converted to a physical surface value expressed in square mm by calibration. The results described below are for plants three weeks post-germination.

### Seed-Related Parameter Measurements

[1364] The mature primary panicles were harvested, counted, bagged, barcode-labelled and then dried for three days in an oven at 37° C. The panicles were then threshed and all the seeds were collected and counted. The filled husks were separated from the empty ones using an air-blowing device. The empty husks were discarded and the remaining fraction was counted again. The filled husks were weighed on an analytical balance. The number of filled seeds was determined by counting the number of filled husks that remained after the separation step. The total seed yield was measured by weighing all filled husks harvested from a plant. Total seed number per plant was measured by counting the number of husks harvested from a plant. Thousand Kernel Weight (TKW) is extrapolated from the number of filled seeds counted and their total weight. The Harvest Index (HI) in the present invention is defined as the ratio between the total seed yield and the above ground area (mm²), multiplied by a factor 10⁶. The total number of flowers per panicle as defined in the present invention is the ratio between the total number of seeds and the number of mature primary panicles. The seed fill rate as defined in the present invention is the proportion (expressed as a %) of the number of filled seeds over the total number of seeds (or florets).

### Example 69

### Results of the Phenotypic Evaluation of the Transgenic Plants

[1365] The results of the evaluation of transgenic rice plants expressing a SPL11 nucleic acid corresponding to the construct pGOS2::SPL11 and pWSI18::SPL11 whether under drought stress or non-stress conditions are given herein. An increase of at least 5% was observed for one or more of the following parameters, emergence vigour (seedling early vigour), total seed yield (seed weight), the seed fill rate (seed filling rate), the number of filled seeds, the number of flowers (seeds) per panicle and the harvest index, and of at least 3% for thousand-kernel (1000-seed) weight in the transgenic plants of when compared to the control nullizygote plants in at least one of the growth conditions.

1-169. (canceled)

170. A method for enhancing yield-related traits in plants relative to control plants, comprising modulating expression in a plant of a nucleic acid encoding an LBD polypeptide, wherein said LBD polypeptide comprises a DUF206 domain.

171. The method of claim 170, wherein said LBD polypeptide comprises one or more of the following motifs:

| | |
|---|---|
| (i) Motif 1: MSCNGCRXLRKGCX, | (SEQ ID NO: 5) |
| (ii) Motif 2: QXXATXFXAKFXGR, | (SEQ ID NO: 6) |
| and | |
| (iii) Motif 3: FXSLLXEAXG | (SEQ ID NO: 7) |

172. The method of claim 170, wherein said modulated expression is effected by introducing and expressing in a plant a nucleic acid encoding a LBD polypeptide.

173. The method of claim 172, wherein said nucleic acid encoding a LBD polypeptide encodes any one of the proteins listed in Table A1 or is a portion of such a nucleic acid, or a nucleic acid capable of hybridizing with such a nucleic acid.

174. The method of claim 172, wherein said nucleic acid sequence encodes an orthologue or paralogue of any of the proteins given in Table A1.

175. The method of claim 170, wherein said enhanced yield-related traits comprise increased yield.

176. The method of claim 175, wherein said increased yield comprises increased biomass and/or increased seed yield relative to control plants.

177. The method of claim 170, wherein said enhanced yield-related traits are obtained under non-stress conditions.

178. The method of claim 170, wherein said enhanced yield-related traits are obtained under conditions of nitrogen deficiency.

179. The method of claim 172, wherein said nucleic acid is operably linked to a constitutive promoter.

180. The method of claim 179, wherein said constitutive promoter is a GOS2 promoter, preferably the GOS2 promoter from rice.

181. The method of claim 172, wherein said nucleic acid encoding a LBD polypeptide is of plant origin.

182. The method of claim 181, wherein said plant is a dicotyledonous plant.

183. The method of claim 182, wherein said dicotyledonous plant is from the family Brassicaceae.

184. The method of claim 183, wherein said dicotyledonous plant is Arabidopsis thaliana.

185. An isolated nucleic acid molecule comprising:
(i) the nucleic acid sequence represented by SEQ ID NO: 69;
(ii) a nucleic acid sequence or fragment thereof that is complementary to the sequence of SEQ ID NO: 69;
(iii) a nucleic acid sequence encoding a LBD polypeptide having at least 60% sequence identity to the sequence of SEQ ID NO: 70; or
(iv) a nucleic acid sequence capable of hybridizing under stringent conditions to any one of the nucleic acid sequences given in (i), (ii) and (iii) above.

186. An isolated polypeptide comprising:
(i) the amino acid sequence represented by SEQ ID NO: 70;
(ii) an amino acid sequence having at least 60% sequence identity to the amino acid sequence of SEQ ID NO: 70; or
(iii) derivatives of any of the amino acid sequences given in (i) and (ii).

187. A plant or part thereof, including seeds, obtainable by the method of claim 172, wherein said plant or part thereof comprises a recombinant nucleic acid encoding an LBD polypeptide.

188. A construct comprising:
(i) a nucleic acid sequence encoding an LBD polypeptide;
(ii) one or more control sequences capable of driving expression of the nucleic acid sequence of (i); and optionally
(iii) a transcription termination sequence,
wherein the LBD polypeptide comprises:
(a) a DUF206 domain;
(b) one or more of the motifs as defined in claim 171;
(c) the amino acid sequence represented by SEQ ID NO: 70;
(d) an amino acid sequence having at least 60% sequence identity to the amino acid sequence of SEQ ID NO: 70; or
(e) derivatives of any of the amino acid sequences given in (c) and (d).

189. The construct of claim 188, wherein one of said control sequences is a constitutive promoter.

190. The construct of claim 189, wherein said constitutive promoter is a GOS2 promoter, preferably the GOS2 promoter from rice.

191. A method for enhancing yield-related traits in plants relative to control plants, comprising using the construct of claim 188 to modulate expression in a plant of a nucleic acid encoding an LBD polypeptide, wherein said LBD polypeptide comprises a DUF206 domain.

192. A method for the production of a transgenic plant having increased yield, particularly increased biomass and/or increased seed yield relative to control plants, comprising:
(i) introducing and expressing in a plant a nucleic acid encoding an LBD polypeptide; and
(ii) cultivating the plant cell under conditions promoting plant growth and development,
wherein the nucleic acid is of plant origin and the LBD polypeptide comprises:
(a) a DUF206 domain; or
(b) one or more of the motifs as defined in claim 171.

193. The plant of claim 187 having increased yield resulting from increased expression of the nucleic acid encoding an LBD polypeptide, or a transgenic plant cell derived from said plant, wherein the nucleic acid is of plant origin and the LBD polypeptide comprises:
(a) a DUF206 domain; or
(b) one or more of the following motifs:

| | |
|---|---|
| (1) Motif 1: MSCNGCRXLRKGCX, | (SEQ ID NO: 5) |
| (2) Motif 2: QXXATXFXAKFXGR, | (SEQ ID NO: 6) |
| and | |
| (3) Motif 3: FXSLLXEAXG. | (SEQ ID NO: 7) |

194. The plant of claim 187, wherein said increased yield is increased biomass and/or increased seed yield, relative to control plants.

195. The plant of claim 187, or a transgenic plant cell derived thereof, wherein said plant is a crop plant or a monocot or a cereal, such as rice, maize, wheat, barley, millet, rye, triticale, sorghum and oats.

The application's sequence listing, which the Patent Office published only in electronic form, follows.

SEQUENCE LISTING (478 sequences)

SEQ ID NO: 1 - DNA, 753 bp, Arabidopsis thaliana
atgagctgcaatggttgccgtgttctccggaaaggttgcagcgagaattgtatcctccggccatgtattcaatggattgaaaccgccgatgctcaaggccacgccaccgtcttcgtcgctaaattcttcggccgtgctggtctcatgtcctttatctccgctgttccggattctcaacgtcctgctttgtttcagtcgttgctctacgaagcttgtggaagaactgtcaatccagttaacggagcaatcggaatgttatggactggaaactggaatatctgtcaagcggctgttgaaacagtgcttcgcggcggttctttaagaccgatcccggagcttctcactcacggcggcggtttcgctggctttccttcgcctacatctgaagaagcatctgagatctgcaccgaaatgttgaatctccagcaaaatgattccaccgatcgtaacatctatcatcattcacgattctcaagctctagatctagatctactatggattcttcttctccgacgaaacgtaagagattatcatcggaagaccaaccatcttcggagcttgatctatctctcatccctaattttcccattaagcaagcaacaccttcttctacacggcggcgatcagtaacaccgtcgatgaactcagaggactccgggacgacgacgactacgacggcgttttgtgacaagggtgatgtgtacggtaacggaggaggagaaacgaccaagttgcttaacctttttgtttaa

SEQ ID NO: 2 - protein, 250 aa, Arabidopsis thaliana
MSCNGCRVLRKGCSENCILRPCIQWIETADAQGHATVFVAKFFGRAGLMSFISAVPDSQRPALFQSLLYEACGRTVNPVNGAIGMLWTGNWNICQAAVETVLRGGSLRPIPELLTHGGGFAGFPSPTSEEASEICTEMLNLQQNDSTDRNIYHHSRFSSSRSRSTMDSSSPTKRKRLSSEDQPSSELDLSLIPNFPIKQATPSSTRRRSVTPSMNSEDSGTTTTTTAFCDKGDVYGNGGGETTKLLNLFV

SEQ ID NO: 3 - DNA, 53 bp, Artificial sequence
  primer: prm009067
ggggacaagtttgtacaaaaaagcaggcttaaacaatgagctgcaatggttgc

SEQ ID NO: 4 - DNA, 50 bp, Artificial sequence
  primer: prm009068
ggggaccactttgtacaagaaagctgggtactaactctgagaaaaccgcc

SEQ ID NO: 5 - protein, 14 aa, Artificial sequence
  conserved motif 1
  UNSURE (8)..(8): Xaa can be any naturally occurring amino acid
  UNSURE (14)..(14): Xaa can be any naturally occurring amino acid
MSCNGCRXLRKGCX

SEQ ID NO: 6 - protein, 14 aa, Artificial sequence
  conserved motif 2
  UNSURE (2)..(3): Xaa can be any naturally occurring amino acid
  UNSURE (6)..(6): Xaa can be any naturally occurring amino acid
  UNSURE (8)..(8): Xaa can be any naturally occurring amino acid
  UNSURE (12)..(12): Xaa can be any naturally occurring amino acid
QXXATXFXAKFXGR

SEQ ID NO: 7 - protein, 10 aa, Artificial sequence
  conserved motif 3
  UNSURE (2)..(2): Xaa can be any naturally occurring amino acid
  UNSURE (6)..(6): Xaa can be any naturally occurring amino acid
  UNSURE (9)..(9): Xaa can be any naturally occurring amino acid
FXSLLXEAXG

SEQ ID NO: 8 - protein, 5 aa, Artificial sequence
  DP(V/I)YG signature
  VARIANT (3)..(3): /replace = "Ile"
DPVYG

SEQ ID NO: 9 - protein, 15 aa, Artificial sequence
  conserved Cys motif
  UNSURE (2)..(3): Xaa can any naturally occurring amino acid
  UNSURE (5)..(10): Xaa can any naturally occurring amino acid
  UNSURE (12)..(14): Xaa can any naturally occurring amino acid
CXXCXXXXXXCXXXC

SEQ ID NO: 10 - DNA, 2194 bp, Oryza sativa
aatccgaaaagtttctgcaccgttttcaccccctaactaacaatatagggaacgtgtgctaaatataaaatgagaccttatatatgtagcgctgataactagaactatgcaagaaaaactcatccacctactttagtggcaatcgggctaaataaaaaagagtcgctacactagtttcgttttccttagtaattaagtgggaaaatgaaatcattattgcttagaatatacgttcacatctctgtcatgaagttaaattattcgaggtagccataattgtcatcaaactcttcttgaataaaaaaatctttctagctgaactcaatgggtaaagagagagattttttttaaaaaaatagaatgaagatattctgaacgtattggcaaagatttaaacatataattatataattttatagtttgtgcattcgtcatatcgcacatcattaaggacatgtcttactccatcccaatttttatttagtaattaaagacaattgacttatttttattatttatcttttttcgattagatgcaaggtacttacgcacacactttgtgctcatgtgcatgtgtgagtgcacctcctcaatacacgttcaactagcaacacatctctaatatcactcgcctatttaatacatttaggtagcaatatctgaattcaagcactccaccatcaccagaccacttttaataatatctaaaatacaaaaaataattttacagaatagcatgaaaagtatgaaacgaactatttaggtttttcacatacaaaaaaaaaaagaattttgctcgtgcgcgagcgccaatctcccatattgggcacacaggcaacaacagagtggctgcccacagaacaacccacaaaaaacgatgatctaacggaggacagcaagtccgcaacaaccttttaacagcaggctttgcggccaggagagaggaggagaggcaaagaaaaccaagcatcctccttctcccatctataaattcctccccccttttcccctctctatataggaggcatccaagccaagaagagggagagcaccaaggacacgcgactagcagaagccgagcgaccgccttctcgatccatatcttccggtcgagttcttggtcgatctcttccctcctccacctcctcctcacagggtatgtgcctcccttcggttgttcttggatttattgttctaggttgtgtagtacgggcgttgatgttaggaaaggggatctgtatctgtgatgattcctgttcttggatttgggatagaggggttcttgatgttgcatgttatcggttcggtttgattagtagtatggttttcaatcgtctggagagctctatggaaatgaaatggtttagggatcggaatcttgcgattttgtgagtaccttttgtttgaggtaaaatcagagcaccggtgattttgcttggtgtaataaagtacggttgtttggtcctcgattctggtagtgatgcttctcgatttgacgaagctatcctttgtttattccctattgaacaaaaataatccaactttgaagacggtcccgttgatgagattgaatgattgattcttaagcctgtccaaaatttcgcagctggcttgtttagatacagtagtccccatcacgaaattcatggaaacagttataatcctcaggaacaggggattccctgttcttccgatttgctttagtcccagaattttttttcccaaatatcttaaaaagtcactttctggttcagttcaatgaattgattgctacaaataatgcttttatagcgttatcctagctgtagttcagttaataggtaatacccctatagtttagtcaggagaagaacttatccgatttctgatctccatttttaattatatgaaatgaactgtagcataagcagtattcatttggattattttttttattagctctcaccccttcattattctgagctgaaagtctggcatgaactgtcctcaattttgttttcaaattcacatcgattatctatgcattatcctcttgtatctacctgtagaagtttctttttggttattccttgactgcttgattacagaaagaaatttatgaagctgtaatcgggatagttatactgcttgttcttatgattcatttcctttgtgcagttcttggtgtagcttgccactttcaccagcaaagttc

SEQ ID NO: 11 - protein, 307 aa, Oryza sativa
MRMSCNGCRVLRKGCSDNCAIRPCLQWIRSPDAQANATVFLAKFYGRAGLINLITAGPEHVRPAIFRSLLYEACGRMLNPVYGSVGLLWSGNWQLCQSAVESVLRGMPIAQPPPSATAVPPLPTCDIRHVGARRGDVHGAAAGPVADLHRLDISSRAKFKRPGGGAAAAHRSDHAAFELVFSKPAAAMAVDVIRQAQPLNWAPGALSHESASHDAAPPESEGHSNDTADTVDGSHVSQSEPEPRATSAATEVHDAGLDLTLGLPPPPPPVQKTEPADSDGGSQQQHDHRKEKPVELGLAISTKVAAQ

SEQ ID NO: 12 - protein, 330 aa, Oryza sativa
MRMSCNGCRVLRKGCSEGCTIRPCLQWIKTPEAQANATVFLAKFYGRAGLLNLLAAGPDHLRPAVFRSLLYEACGRIVNPIYGSVGLLWSGQWQACQAAVEAVLKGDPVVQVSSEAAAAAQATPPLRAYDIRHVSKDAEADAAANLLRVARGGRTRFKRASSSSNSKHGAKLAGAAAAKRAASPSSSSPTHETEPEAVVVVGDHDDDHHHPALSHEVHEESAGSHDHDDDDHVDDGDNNDMAIADVTPPRAGSEDTEVETGSHVSQAEQSPVPVEHEEGEEEEVGLELTLGFQPLVVRASRRPSSAEARCDLSGLSAESSRIGLRLELPA

SEQ ID NO: 13 - protein, 204 aa, Oryza sativa
MSCNGCRVLRKGCSDGCVLRPCLQWIDAADAQGHATVFVAKFFGRAGLLSFISAVPEAQRPALFQSLLYEAAGRTINPVHGAVGLLWTGNWPLCQAAVETVLRGGAIGPLPELGGACGGAGGDLYGAAKRNGGWSTFSTAKRVRKAEVPEAPSCDLGLCLSPGSPPAVGERKPALRPGTPSMSSDESGTTTGGERDPVLLNLFV

SEQ ID NO: 14 - protein, 232 aa, Oryza sativa
MSCNGCRVLRKGCSDACVLRPSIEWIDGAQPQANATVFVAKFFGRAGLVASLAAVPLHHRPALFRSLLYEACGRTINPVSGAIGLMWTGNWDLCQAAADAVLRGDSLRALSAVPAAFTDRDMAGLYGNVGAAAGTSSSSPDNDNSSASAAPRRKRPRNNGAGAGVGQQQLPHAVAAVLQSCELDLCLTPVSPPAVQLVGGGGGASDEHSTTTCEEASDGDGAGAPTLLNLFS

SEQ ID NO: 15 - protein, 226 aa, Oryza sativa
MSCNGCRVLRKGCSEGCVLRPCLQWIDGAEAQGHATVFVAKFFGRAGLMSFLTAVPEPQRAAVFQSLLYEAAGRTINPVGGAVGLLSGGSWHLCQAAVDTVLRGGGIQPLPDQVDAAAAGGRDVFASTARRAMGGCSTFSTAKRSTTTTTTKNPGTPHDAAAAAPQPEPSCDLGLWLSPGSPPAPGDRRSGGRRADTPSMNSEGSVTTCGVVGDGEREPELLNLFV

SEQ ID NO: 16 - protein, 224 aa, Nicotiana benthamiana
MSCNGCRVLRKGCSENCILRPCLQWIETAESQGHATVFVAKFFGRAGLTSFISAVPENQRPSLFQSLLYEAAGRTVNPVNGAVGLLWTGNWHVCQAAVETVLRGGALRPIPDFLGASLDIDESSECTDIFKLQHPSQNNIQPTMQKRRRFPEEASNVLQLADLDLSLTPGFQSQKVFNHALPENRRPATPSMNSEESGTTTCFESGTVIGNHQGNEPKLLSLFN

SEQ ID NO: 17 - protein, 230 aa, Glycine max
MSCNGCRVLRKGCSESCILRPCLQWIETAEAQGHATVFVAKFFGRAGLMSFISNVPENQRPALFQSLLFEACGRTVNPVNGAVGLLWTGNWHVCQAAVETVLRGGTLRPMPELMGLDAAAAAAAAADETSEAEVGCTDTWRIRNPNTNCRFTSSRSSSGGGGGKRKRSEELAKLQEQQPNLDLRLTPVFLQKEESRRPESPSMTSEESGTTTENRFGDQWSHWKVLNLFI

SEQ ID NO: 18 - protein, 240 aa, Glycine max
MSCNGCRVLRKGCSESCILRPCLQWIDTPEAQGHATVFVAKFFGRADLMSFISNVPEPQRPALFQSLLFEACGRTVNPVNGAVGLLWTGNWHVCQAAVETVLRGGTVRPMPELFGLDAPTPTTDDASEGEVTCTDKWRVRDPNPNFRFPGSRSDKGSSGGKRKRFEELAKLQTATTDLNLRLTPSFLQNAANFGCRQEIRWPGSPSMNSEESGTTTACLESGIGDHYAPDGDRKVLNLFI

SEQ ID NO: 19 - protein, 222 aa, Hordeum vulgare
MSCNGCRVLRKGCNDACMLRPCLLWIEGADAQGHATIFAAKFFGRAGLMSFLTAVPESQRPAVFQSLLYEAAGRTINPVGGAVGLLWAGSWHLCEAAVQTVLRGGAIRPLPELAGGVPEGGVGGSDLFASSSRRAVVGCSTYSMAKRVTPRKTWAPEAASHHQEPSCDLGLFLTPGSAAAAEGERRARRAGTPSMSSDGSVTTTAGAGADGDKEPELLNLFV

SEQ ID NO: 20 - protein, 235 aa, Sorghum bicolor
MSCNGCRVLRKGCSEACVLRPCLQWIDAADAQGHATVFVAKFFGRAGLLSFISAVPDAQRPALFQSLLYEAAGRTINPVHGAVGLLGTGNWHLCQAAVDTVLRGGAIGPLPELGITGSAGDLYGPPGAGTGHGGGGGKRAGGWSTFSTAKRVRKAAATGAPPPPPAAEPEASCDLRLCLLSPGSPPPPAGDRRAPFMRPGTPSITSDDDSVTTTTTTTTTGGGGDREPVLLNLFA

SEQ ID NO: 21 - protein, 231 aa, Aquilegia sp.
MSCNGCRVLRKGCSESCILRPCLQWIESPEAQGHATVFIAKFFGRAGLMSFISSVPESQRPALFQSLLFEACGRTVNPVNGAVGLLWTGNWHICQAAVETVLRGGTLRPINEVLGASLMMMPESADEMSEVITTTQDPTYSRPKVMHIKKKEIIHENVNKIMIHDLDLSLTSGSSSPRKTTKRSTTPSTEESVTTSLDSGAGVWRDDHYLRRGSGEDNNNNGDQKLLNLFV

SEQ ID NO: 22 - protein, 228 aa, Vitis vinifera
MSCNGCRVLRKGCSESCILRPCLQWIESAESQGHATVFVAKFFGRAGLMSFISAVPENQRPALFRSLLYEACGRTVNPVNGAVGLLGTGNWHVCQAAMETVLRGGTLRAMPELLNGVSTPECDEASEAEVTCTDMFKLRDPNSSSRSKVPKRKRLEEASKVQCTDLDLRLTPGLTGKISSRGLGAMSYLPETRRPGTPSMNSEESVTTTCFETPHSPEGERKLLNLFL

SEQ ID NO: 23 - protein, 237 aa, Lotus japonicus
MSCNGCRVLRKGCSESCILRPCLQWIDTAEAQGHATVFVAKFFGRADLMSFISNVPQPQRPSLFQSLLFEACGRTVNPVNGAVGLLWTGNWHVCQAAVETVLRGGTLKPLPELLGLDAPSHVPTAADDASEGEVTYDTWRIRDPNPNARLTNSRSSAGKRQRPEELAKLQTTTDLNLRLTPGFLQNVSSYGCKREARRPGSPSMNSEESVTTTACLGSGIGDHCSRDEDRKVLKLFV

SEQ ID NO: 24 - protein, 232 aa, Gossypium hirsutum
MSCNGCRVLRKGCSESCILRPCLQWIESPEAQGHATVFVAKFFGRAGLMSFISAVPESQRPALFQSLLFEACGRTVNPVNGAVGLLWNGNWHVCQAAVETVLRGGSLRSMPELMAPTPASDEASEATCTDMWKLRETSTNLNSNCRFSNSRSRVSPKRKRVEEEFKKLQPSDLDLGLTPSFTGKRVTDNRRPGTPSMNSEESVTTTCFESVFADQQGQGSRGTDKKLLKLFV

SEQ ID NO: 25 - protein, 287 aa, Triticum aestivum
MRLSCNGCRVLRKGCSEDCSIRPCLQWIKSPEAQANATVFLAKFYGRAGLMNLINAGTDDSLRPGIFRSLLYEACGRIVNPIYGSVGLLWSNNWQMCQAAVEAVLSGKPIVQVSSEDAAADRTPPLKAYDIRHVSTSPAADGRLHKVAKPGRTRFKRASSASSHHNPSSDSNNKPKPKPQPQTRAPTAEEERDRQHRKEMEEGAFQRAPSHESSDSRHEDPVEPHCQQEASADTEAEAGSHVSQAEQEQSTEPAAEHAEEVEKEDEELGLELTLGFAPVAARPAEFT

SEQ ID NO: 26 - protein, 274 aa, Solanum tuberosum
MRMSCNGCRVLRKGCSKSCSIRPCLQWIKTPDSQSNATVFLAKFYGRAGLMNLINAGPDHLRPAIFRSLLYEACGRIVNPIYGSVGLLWSGNWQLCQNAVEAVLKGTPITPIASEIAVNNNGPPLKLPYDIRHINKDENSTKSSELHRVRTRCRFKRSGANTKATKSNPACSGSGDEFAHEKVNGSTSHESSLSHQSEEEAAAAAAVALNVECESPEMAEVEDSAKADGEVELELTLGFSSLGTVEGKPKETKRNKGVQLVDGAGECKIELGLH

SEQ ID NO: 27 - protein, 301 aa, Medicago truncatula
MRMSCNGCRVLRKGCSENCSIRPCLQWIKSPESQANATVFLAKFYGRAGLMNLVNAGPEHLRPAIFRSLLYEACGRIVNPIYGSVGLLWSGSWQLCQAAVEAVLKGAPITPITSEAAANGRGPPLKAYDIRHVSKEENSAASTELTQQRVKPRSRKRSSLAKLKIQEEEKSSNDNKGVESGSTEPTGSVEPVEEVMNRSVSHESSISHQSEAVAVVDGESKDSESETSMILFRDEPELDRKMKPADRTGENGEEKVGLELTLGLEPVSRVYHVVPVKKRRVVLKDCGVGSWNVELGLQYPA

SEQ ID NO: 28 - protein, 302 aa, Hordeum vulgare
MRLSCNGCRVLRKGCSEDCSIRPCLQWIKSPEAQANATVFLAKFYGRAGLMNLINAGTDDSLRPGIFRSLLYEACGRIVNPIYGSVGLLWSNNWQMCQAAVEAVLSGKPIVQVSSEDAAADRTPPLKAYDIRHVSTSPAADGRLHKVAKPGRTRFKRASSASSHHNPSSDSNNKPKPQPRPPTAEEELDRQHRKEMEEGAFQRAPSHESSDSRHEDPVEPHSQQEASADTEAEAGSHVSQAEQEQEQSTEPAADHAEEVEKDDEELGLELTLGFAPVAARPAGCHLSVRTAAEPAFVGLRFL

SEQ ID NO: 29 - protein, 253 aa, Vitis vinifera
MRMSCNGCRVLRKGCSDDCSLRPCLEWIKTPESQANATVFLAKFYGRAGLMNLLNAGPEHLRPAIFRSLLYEACGRIVNPIYGSVGLLWSGNWNHCQNAVDAVLGGSQIMEVPCDTAAIRPILPLKAYDIRHLSKDANSPHDLHKAKTRSRFKRCGARSKPHLDSAEFCNPGWNQFSPVDYNRAPSHDSSLIQQETDSMFSVETVEASLATPPKPNQLLKSDGQTDKTEAGLELTLGFYPISRPHACKLELGP

SEQ ID NO: 30 - protein, 234 aa, Solanum tuberosum
MRMSCNGCRVLRKGCSENCSLRPSLQWIKSPDSQANATVFLAKFYGRAGLINLINAGPDHLRPAIFRSLLYEACGRIINPVNGSVGLMCSGNWQRCQEAVESVLKGSTIMQVPINNDDDNNNNNNNNTDQIVPLKGCDIRHVSKNNSTNSDNQQVIKTRKGRLKRKGTFDSVASASAEAEAAEEYLLKNQPPLKFSIAGWDQFEEIDDELIKRAASHDSFSVETVELTLLGEPG

SEQ ID NO: 31 - protein, 334 aa, Pinus taeda
MRVSCNGCRVLRKGCSDSCELRPCLQWIKTSESQAQATVFLAKFYGRSGLMNLIKSGPEFLRPTLFRSLLYEACGRIVNPIFGSVGLIWSGNWHICQAAVESVLKGYPLQPLHPLNSLEIASPPPAAAAPQSMKAVADKLRNVRSQGRFKRPLYRKPSRDVKNLNLHALKDEEAAGILTGSQAYNLRWRRCYPKEFQLINAQPVNNFLSIDSSSDSDDLIRLKTGFESVKSDCNPIENRETRALSEGISEGPALSEGIENQNECPLQNLFQQNDNNWVENNIMRTELTDERNLGLELTLGSSMGETTQSHRKQLGSNCMDRPPLYRSLDLSLSQ

SEQ ID NO: 32 - protein, 336 aa, Pinus taeda
MRMSCNGCRVLRKGCSETCIIRPCLQWIKNEESQANATVFLAKFYGRAGLMNLISAGPEHLRPAIFKSLLYEACGRMVNPIFGSVGLLCSGNWQLCQAAVESILKGCPIHPILVDSSGTQMPTERSNTNPSVRSTLMETITNELHKVKTKGRFKRRKSTVKDVSLNNSDAEDLGASQVFNLRWRRCYPGESQTPALEGIPNHLVSSDSSCESLEHFDDLRNHKEADMEGHMSKAMDMGPVNIKCCSDQNDHKATMESVPEVSYTQAPDLEDMQAIKHEYESISSDVTDVKLELTLSSQGSATHAAEKHHTNLHWNSCMEHSDEPTITYLGLGLTQA

SEQ ID NO: 33 - protein, 184 aa, Glycine max
MRMSCNGCRVLRKGCSEDCSIRPCLQWIKNPESQANATVFLAKFYGRAGLMNLINAGPENLRPAIFRSLLYEACGRIVNPIYGSVGLLWSGSWQLCQAAVEAVLKGEPITPITSEAAANGRAPPLKAYDIRHVSKDQNSANETPKTKTRSRFKRTSGTLIKPKASKGTGFVPVEPEMANPDCES

SEQ ID NO: 34 - protein, 230 aa, Triticum aestivum
MSCNGCRVLRKGCSDACVLRPSIEWIDGAQPQANATVFVAKFFGRAGLVASLAAVPLHHRPALFRSLLYEACGLTINPVSGAIGLMWTSNWDLCQAAAEAVLRGDSLRSLSAVPAAFTERDMAGLYGNVGTNTGSSSSLHSSPENSTSAPARKRSKNNCGAAVGQQVKLPGPGPVLQSCELDLCLTPLSSPLAGGRRGGASDEYSTTTCCEEASGDAAEAGAPPLLNLFN

SEQ ID NO: 35 - protein, 290 aa, Aquilegia sp.
MRMSCNGCRVLRKGCSENCSIRPCLQWIKTPESQANATVFLAKFYGRAGLMNLINSGPEHLRPAIFRSLLYEACGRIVNPIYGSVGLLWSGSWQLCQAAVEAVLKGTPIMQISSEVAAISPSPPLKAYDIRHVSKDENSSAASQELHKVKTRSRFKRSGAGKAANNKQVNESNKVHTYLDRAPSHESSVSHQTELNNGEGCSRETESMFSVETVEASLVNRADPEPVPKFDNFNGSDADDNNNDDVELELTLGFEPSRREKSMSPKKWRDEINNSYTDTCKIEVGIDYAV

SEQ ID NO: 36 - protein, 217 aa, Solanum tuberosum
MSCNGCRVLRKGCSDNCILRPCLQWIETPEAQGHATVFVAKFFGRAGLMSFISAVPENQRPALFQSLLYEAAGRTVNPVNGAVGLLWTGNWHVCQAAVETVLRGGALRPISEFLGASVEIDEVSDCTDVFKLQDPSLNMRPKMQKRRRFPEETSMLADLDLSLTPGFNQKVYNSHPLAENHRRPGTPSMNSEESGTTTCFESTAVIGEEPKLLSLFN

SEQ ID NO: 37 - protein, 212 aa, Solanum tuberosum
MSCNGCRVLRKGCSDNCILRPCLQWIETPEAQGHATVFVAKFFGRAGLMSFISAVPENQRPALFQSLLYEAAGRTVNPVNGAVGLLWTGNWHVCQAAVETVLRGGALRPISEFLGASVEIDEVSDCTDVFKLQDPRKMQKRRRFPEETSMLADLDLSLTPGFNQKVYNSHPLPENHRRPGTPSMNSEESGTTTCFESTAVIGEEPKLLSLFN

SEQ ID NO: 38 - protein, 217 aa, Solanum tuberosum
MSCNGCRILRKGCNENCILRQSLQGIESPHAQANATVFVAKFFGRAGLMSFLTSVSESQRPALFQSLLFEACGRTVNPVHGAVGLLWTGNWHVCQSAVETVLKGGVLRPLPEFSGVTASPEFDSEANDVDLFRSQSSNFQSKRKIIDEVSEDLDLGLTSGLSTMVTGGKLNRRTEKRRAATPSLNSDESDTTTLESGVVYHQNPQQGNETKLLRLFF

SEQ ID NO: 39 - protein, 277 aa, Picea alba
MSATDKNITERKEQQRKMSCNGCRVLRKGCSDNCILRQSLQWIESPQSQAHATVFVAKFFGRAGLMTFIATVSEPERPDLFKSLLYEACGRTVNPVHGAVGLMWTGKWQICQAAVQTVLSGGSLDRTPASPWFPLTDANGDRNRMSAGDQWPNETDVGNYPGDDDVCKIYELDACVDSRRVRQKIDGSNNNNNEIASTDADKLGQRGSGIDGQKNDIKLDLSLNCSSKSKSSNLKQQRVSSPSTNSVHSEGSVNRLKISNPLPSSTMASQQKFLDLL

SEQ ID NO: 40 - protein, 363 aa, Pinus taeda
MTATTGAGNSGRDLSVFIQRKQEADGRKRMSCNGCRVLRKGCSDTCILRPCLQWIESPEAQGHATVFVAKFFGRAGLMSFISAVPDHQRPALFQSLLYEACGRTVNPVNGAVGLLWNGNWQLCQAAVETVLKGGTLRPPQSSSVIPTCSTRPSLMNSFSANFRVNSNVNNINSSGSRLSLEVGKARPVNEMREMYTVKPEVDFPLNRPQESCNPHQPWAAKVKSEPHDLTLCEAFEAVRHSQTIIHSPPSEIAAAPRRVRQRIEGINEVNYRDLSNSNSDDVKCLGVFDIHPNNTMEMKANLDLTLNFEASSSSHIKRRVSSPSIVSVNSEGSVTSLESGSLRVPNQKDSSAAKEHKVLDLFP

SEQ ID NO: 41 - protein, 276 aa, Pinus taeda
MSATENHITERKEQERKMSCNGCRVLRKGCSENCILRQSLQWIESPQSQAHATVFVAKFFGRAGLMTFIAAVSEPERPALFKSLLYEACGRTVNPVHGAVGLLWTGKWQICQAAVQTVLSGGSLDRTPAGTCFPSTDANGDRNGMSDGDQWPNEMDGNFPGDDDVCKIYELGACDDSRRVRQKIDGNNNNINELMSTDGEKLGQRGSGIDGQKNDLKLDLSLNCPSKSKSSNLKQQRVSSPSTNSVHSEGSVNRLKSSSPPPSSTMAAEQKLLDLL

SEQ ID NO: 42 - protein, 218 aa, Lycopersicon esculentum
MSCNGCRVLRKGCSDNCILRPCLQWIETPEAQGHATVFVAKFFGRAGLMSFISAVPENQRPALFQSLLYEAAGRTVNPVNGAVGLLWTGNWHVCQAAVETVLRGGALRPISEFLGASVEIDEVSDCTDVFKLQDPSLNMRPKMQKRRRSPEETSMLDLSLTPGFNQKVYNSHPLPENHRRPGTPSMNSEESGTTTCFESSAVIGDHQGKEPKLLSLFN

SEQ ID NO: 43 - protein, 238 aa, Populus tremuloides
MSCNGCRVLRKGCSENCILRPCLQWIESPEAQGHATVFVAKFFGRAGLMSFISAVPENQRPSLFQSLLFEACGRTVNPVNGAAGLLWTGNWHVCQAAVETVLRGGTLQPMPELLTGGGGSPSPSSDEASEVEVACTDIWKLQDPNPNHHPRFSISRSRLSPKRKRTEEPVAVKVQHNDLDLGLTPSFSLKGFPYKQQIRRPGTPSMNSAESVTTNTACFDSAGLGDEGGETKLLNLFL

SEQ ID NO: 44 - protein, 242 aa, Populus tremuloides
MSCNGCRVLRKGCSENCILRPCLQWIESPEAQGHATVFVAKFFGRAGLMSFISSVPEDQRPSLFQSLLFEACGRTVNPVNGAVGLLWTGNWHVCQAAVETVLRGGTLRPMPDLLTGGGSPSSSPPSDEASEFEVACTDIWKLQDPNPNPIHHSRFSNSRSRVSSKRKGTEEPMVVNMRHDDLDLLLTPSTSQKGFAEICRPGTPSMNSEESVTTNATCFDSAGFGDQYGNGGGETKLLNLFL

SEQ ID NO: 45 - protein, 208 aa, Populus tremuloides
MSCNGCRVLRKGCSETCVLRSCLHWIPTPEAQGNATLFLAKFFGRSDLISLISAVPESQRPVLFQSLLFEACGRTVNPVNGAVGLLWSGNWHVCQAAVESVLAGETLRPLPGILTGVLAPNCDESSDSFSAAAYAVHSMTWNQSKPFDKENNNQVVSDHHVNLCLARGRGGRDKRGRDAVSFYTGGESETTSFESSGADKNKLLNLFV

SEQ ID NO: 46 - protein, 208 aa, Populus tremuloides
MSCNGCRVLRKGCSETCVLRSCLHWITNPEAQGNATLFLAKFFGRSDLMSLISAVPEAQRPALFQSLLFEACGRTVNPVNGVVGLLWSGNWHMCQEAVETVLSGGALQPLPGILTGVLAPNCDESSDRFSAAAYAVHNMARNQSRSFAKENNKEVVSDHRINLCLARGKGGRDKRGRDAVSFYTGGESETISFESSGGDKKRLLNLFV

SEQ ID NO: 47 - protein, 296 aa, Populus tremuloides
MRMSCNGCRVLRKGCSENCSIRPCLQWIKSSESQANATVFLAKFYGRAGLMNLINAGPEHLRPAIFRSLLYEACGRIVNPIYGSVGLMWSGSWQLCQAAVEAVLKGAPITPINSEAAVNGHGPPLKVYDIRHVSKEENSAASNDANRARTRCRVRRVVKPKASKRACFGNGLASIAVDTLSARDELTRCTSHESSVSHQSELAVLDGDSKESDESMVSVETAEASLLFPPNPESKNDCKAHDVASNGISGLELGLDLTLGLEPVSRAHHVVPVKKRRVEAYGSGDVDTCKMELRLE

SEQ ID NO: 48 - protein, 241 aa, Populus tremuloides
MSCNGCRVLRKGCNDNCTIRPCLQWIKSTDSQANATLFLAKFYGRAGLINLIEAAPQRLRPAIFSSLLYEACGRIVNPVYGSVGMLWSGNWAQCQAAVDAVLKGLPIISIPSSDVPTPHLISSLNTYDIRHVSRDQNSPELNKVKSRTRCKRSIGTRPSSLAEPTGRLNQGELGFEPVRESWLGHLGNGDSRIKDEDSILAAENVEDSLWSRVEPDQVFKFNGQSDDSDLSLELTLALVSE

SEQ ID NO: 49 - protein, 273 aa, Populus tremuloides
MPFSALSFSSLPHRIILLLIGFLNSSPSLSRHFSISFRTEYTMRMSCNGCRILRKGCGDNCSIKPCLQWIETPDSQANATLFLAKFYGRAGLMNLINACPQHLRPDTFKSLLYEACGRIVNPVSGSVGLLSTGSWQQCQAAVEAVLKGEPITQIASTDQLTLGGSDTRHVSREEDWSASDQPRKIKSKRQFNRSTSKRKPSRTEAEHTCFEFMIGFDGLRSVSPDSVLSWRPSLGSDNEETDSIGSVETVEASKLDEPAEGSDLDLDLTLGHY

SEQ ID NO: 50 - protein, 231 aa, Caragana korshinskii
MSCNGCRVLRKGCSESCILRPCLQWLENPEAQGHATVFVAKFFGRAGLMSFLSNVPETQRPALFQSLLFEACGRTVNPVNGAVGLLWTGNWHVCQAAVETVLQGGTLRPLPEHTLLDAPPAATDEASEAEDACTGIWRIRDPNPNCRPNGSRSNNKVSTGGKRKRSEELVKIPAATNLDLRLTPIFLQKESESRRPGSPSMNTEESVTTTATGLGDSWGHGGERKVLNLFI

SEQ ID NO: 51 - protein, 264 aa, Brassica napus
MRMSCNGCRVLRKGCSDDCSIRPCLGWIKSPEAQANATVFLAKFYGRAGLMNLINAGPDHLRPGIFRSLLHEACGRIVNPIYGSVGLLWSGNWQLCQSAVEAVMKGEPITEMATDAATSGQGPPLKMYDIRHIAKDENSPAAAAAAGSTDRKRGKTRRAKRVAAVAKPAESGGGEASHHSSLSHQSEVVVAPHEGESKESESNNSEVMTFSPPAVQGSGEIKLDLTLGLEPVSRADHVVPVKKRKMGVFSTWQEESSCKTDPVL

SEQ ID NO: 52 - protein, 233 aa, Medicago truncatula
MSCNGCRVLRKGCSESCILRPCLQWIETPEAQGHATVFVAKFFGRAGLMSFISNVPEPQRPALFQSLLFEACGRTVNPVNGAVGLLWTGNWHVCQAAVETVLRGGTLRPLPELTLLDAPLTATDEASEAEDGGADAMWKIREPNFGLASSRSSNKVCSGSKRRRSEEFVKVPAAINLDLRLTPIFQQKAVEERRHGSPSMTSEESVTTTACLETGIGDRWSHGGDRKVLNLFI

SEQ ID NO: 53 - protein, 278 aa, Medicago truncatula
MRMSCNGCRVLRKGCSEDCSIRPCLEWIKCPQSQANATLFLAKFYGRAGLINLINSGSENLRPAIFRSLLYEACGRIVNPIYGSVGLLWSGSWHLCQAAVEAVLKGEPITPIDSEADENERGPPFKAYDIRHVSKDENLEETKQVRTRSRFRRAMKPKPSKEVGSGSGSSSAKEVDRSKSQESSLSQPGKDSESGVSVETSILFHDESEFEPESQAKVKGRAEGRAEEGLSDGVGLELRLGIEPVSREEFMVPIKKRKIVLKDCSASSKVELGLELSA

SEQ ID NO: 54 - protein, 247 aa, Arabidopsis thaliana
MSCNGCRVLRKGCSENCILRPCIQWIESPEAQGHATVFVAKFFGRAGLMSFISAVPESQCPALFQSLLYEACGRTVNPVNGAVGLLWTGNWNVCQAAVETVLRGGSLKPIPELLNGGGFAGFPSPTSDEASEICTEMLNLRKADDSGDRNIYHHCRFSSSRSRSRSTASPPKRKRLSSEQQPSSELDLSLIPIYPIKTLPFKEDTPSMYSEESVTTVSFQNNNAGDRYVRCGGGGGGATTKLLNLFA

SEQ ID NO: 55 - protein, 240 aa, Arabidopsis thaliana
MSCNGCRVLRKGCSETCILRPCLQWIESAESQGHATVFVAKFFGRAGLMSFISSVPELQRPALFQSLLFEACGRTVNPVNGAVGMLWTRNWHVCQAAVETVLRGGTLRPISDLLESPSLMISCDESSEIWHQDVSRNQTHHCRFSTSRSTTEMKDSLVNRKRLKSDSDLDLQVNHGLTLTAPAVPVPFLPPSSFCKVVKGDRPGSPSEESVTTSCWENGMRGDNKQKRNKGEKKLLNLFV

SEQ ID NO: 56 - protein, 233 aa, Arabidopsis thaliana
MRMSCNGCRVLRKGCSENCSIRPCLQWIKSAESQANATVFLAKFYGRAGLMNLLNTGPDHLRPAIFRSLLYEACGRIVNPIYGSVGLLWSGNWHLCQAAVEAVMRGSPVTPIACDAAVTGQAPPFNNKLCDIRHVSSRDENVKRRSRGACKEERNVRSLSHESSLSHESPVSSEETTTEEPKTWIGLELTLGLEPLARGNHVVVPMKKRKLERCGTSEDEDTCKIELGLVCSE

SEQ ID NO: 57 - protein, 263 aa, Arabidopsis thaliana
MRMSCNGCRVLRKGCSEDCSIRPCLAWIKSPEAQANATVFLAKFYGRAGLMNLINAGPNHLRPGIFRSLLHEACGRIVNPIYGSVGLLWSGNWQLCQDAVEAVMKGEPVKEIATDAATIGQGPPLKIYDIRHISKDDNSAAAATGSTDLKLAKTRRAKRVSTVAIQAESEGKSDEASHDSSLSHQSEIVAAHEGESKESESNVSEVLAFSPPAVKGSGEIKLDLTLRLEPVSRAYHVVPVKKRRIGVFGTCQKESTCKTELML

SEQ ID NO: 58 - protein, 233 aa, Arabidopsis thaliana
MRISCNGCRVLRKGCNQDCTIRPCLQWIKSADSQANATLFLAKFYGRAGLLNLIESGPDHLRPAIFRSLLYEACGRIVNPVDGSVGLMWSGNWAQCQAAVDAVLNGLPITHTPLPSASASHQIIPPHRTYDIRHVAKDPTTGGDSSENLATRVNANKSKTQTGRFKRESVNQLGECSHDMWQLPSSSATHGYGHFTLENVESRREAPFNQSSPNLGFDDQVDINEVGLELRLG

SEQ ID NO: 59 - DNA, 924 bp, Oryza sativa
atgcggatgagctgcaacgggtgccgcgtgctgcgcaaggggtgcagcgacaactgcgccatccgcccctgcctgcagtggattcgcagccccgatgcgcaggccaacgccaccgtcttcctcgccaagttctacggccgcgccggcctcatcaacctcatcaccgccggccccgagcacgtccgtcctgccatattccggtcgctgctgtacgaggcttgcgggcggatgctgaacccggtgtacggatccgtcggcctcctctggtcggggaactggcagctttgccagtccgccgtcgagtccgtcctccgcggcatgcccatcgcgcagccgccgccgtccgccaccgccgtgcccccgctccccacctgcgacatccgccacgtcggcgccaggagaggcgacgtccatggcgccgcggccggcccggttgccgacctccaccggcttgacatcagctcgcgcgccaagttcaagaggcccggcggcggcgccgccgccgcccacaggtccgaccatgccgccttcgagctcgtcttctccaagcccgccgccgccatggccgtcgatgtgataaggcaggcgcagccgctcaactgggcgcccggggcgctcagccacgagtcggcgagccacgacgccgcgccgccggagagcgagggccacagcaacgacacggccgacaccgtggacggctcccacgtcagccagtcggagccggagccgagagcgacgtcggcggcgaccgaggtgcacgacgccggcctagacctcacattaggtctaccgccgccgccgccgccggtgcaaaagaccgagccggcggacagcgacggcggcagccagcagcaacacgatcatcggaaggagaagccggtggagctcggcttggcgatctcaactaaagtagcagctcaatga

SEQ ID NO: 60 - DNA, 993 bp, Oryza sativa
atgcggatgagttgcaacggttgccgggtgctgcgcaagggatgcagcgaagggtgcaccatccgtccgtgcctgcagtggatcaagacccccgaggcgcaggccaacgccaccgtcttcctcgccaagttctacggccgcgccgggcttctcaacctgctcgctgccgggcctgaccacctccgccccgccgtcttccgctcgctcctctacgaggcctgcggccgcatcgtcaacccgatctacggctccgtcggcctgctctggtcgggccagtggcaggcgtgccaggccgccgtcgaggccgtcctcaagggcgaccccgtcgtgcaggtctcctctgaggccgccgccgccgcccaggccaccccgccgctcagggcctacgacatccgccacgtctccaaggacgccgaggccgacgccgccgccaacctgctccgcgtcgcgcgcggcggccgcacccgcttcaagcgcgcctcctccagctccaactccaagcacggcgccaagcttgccggagcagccgccgccaagcgcgccgcgtcccccagcagcagcagcccgacgcacgagacggagccggaggcggtggtcgtcgtcggtgaccatgacgacgaccaccaccaccctgcgctgagccacgaggtccacgaggagtcggctggcagccatgaccacgacgacgacgaccatgtggacgacggtgacaacaacgacatggccatcgccgacgtgacgccgccgcgggcgggatcggaggataccgaggtcgagaccggctcacacgtgagccaggccgagcagagccccgtgccggtggagcacgaagagggggaggaggaggaggtcgggctggagctcacgctcgggttccagccgctcgtcgtgcgcgcctcgaggaggccttcgtcggcggaggcgcgctgcgaccttagcggcttgagcgcggagtcgagtcgcatcggcctgcggctcgagctgccagcgtga

SEQ ID NO: 61 - DNA, 615 bp, Oryza sativa
atgagctgcaacggttgccgggtgctgcggaaggggtgcagtgacggctgcgtgctgcggccatgcctgcagtggatcgacgccgccgacgcgcagggccacgccaccgtcttcgtcgccaagttcttcggccgcgccggactcctctccttcatctccgctgtccccgaggcgcagcgacctgcgttgttccagtcgctgctgtacgaagcagcggggcgaaccatcaatccggtgcacggcgcggtgggcctcctctggacggggaactggcccctctgccaggccgctgtcgagaccgtgctgcgtggaggcgccatcggccctctgccggagctcggcggggcctgcggcggcgctggcggggacctctacggcgccgccaagcgcaacggcggctggtctaccttctccactgcgaagcgggtgaggaaggccgaggtacctgaagccccgtcgtgcgacctaggcctgtgcctcagccccggctctccgccggcggtgggggagaggaaaccagcactgcggccggggacgccgtcaatgagctccgatgagtccggcaccacaaccggaggcgaaagggatcctgtgctgctcaacctttttgtctga

SEQ ID NO: 62 - DNA, 699 bp, Oryza sativa
atgagctgcaacgggtgccgcgtgctgcggaaggggtgcagcgacgcgtgcgtgctgcggccgagcatcgagtggatcgacggcgcgcagccgcaggccaacgccaccgtcttcgtcgccaagttcttcggccgcgccggcctcgtcgcctccctcgccgccgtccctctccaccatcgtccagcgctgttccggtcgcttctgtacgaggcgtgcgggcggacgataaacccggtgagcggcgccatcgggctcatgtggacgggcaactgggacctctgccaggccgccgccgacgccgtcctccgcggcgactccctccgcgccctctcggccgtgccagccgccttcaccgaccgcgacatggccggcctctacggcaacgtcggcgccgccgccgggacctcctcctcctcgcccgacaacgacaactcctccgcctccgccgcgccccggaggaagcggcccaggaataacggcgccggcgccggcgtcggtcagcagcagctgccgcacgcggtggctgcggtgctccagtcctgcgagctggacctctgcctcacgcccgtctcaccgccggccgtgcagctggtgggtgggggcggcggcgcgtcggacgagcactcgacgacgacgtgcgaggaagccagcgacggggatggcgccggggcgcccacgctgctgaacctcttcagctga

SEQ ID NO: 63 - DNA, 681 bp, Oryza sativa
atgagctgcaacggctgccgcgtgctgcggaaggggtgcagcgaggggtgcgtgttgcggccgtgcctgcagtggatcgacggcgccgaggcgcagggccacgccaccgtgttcgtcgccaagttctttggccgcgccggcctcatgtccttcctcaccgccgtccccgagccgcagcgcgcagcggtgttccagtcgctgctgtacgaggcggcggggaggacgatcaacccggtgggcggcgcggtcgggctgctctccggcgggagctggcacctctgccaggcggcggtcgacaccgtgctgcgcggcggaggcatccaaccgctgccggaccaggtcgacgccgccgccgccggtggccgcgacgtgttcgcctccacggcgaggcgcgccatgggcgggtgctccacgttctcgacggcgaagcggtcgacgacgacgacgacgaccaagaaccccggtactccgcatgacgccgccgccgcggcgccccagccggaaccgtcgtgcgacctcggcctgtggctcagccccggctccccgccggcgcccggggaccggcgatccggcggcaggcgggccgacacgccgtcgatgaactccgagggatccgtcacgacgtgcggcgtcgtcggcgacggcgagagggagcccgagctgctgaatctttttgtctag

SEQ ID NO: 64 - DNA, 1036 bp, Oryza sativa
aaacattgaaacactttgtcccactctctctctttctctttcttgtaccaaaagctttttgaatctccaagattatagcaaaaccaaagataaaatactaacttaaaaagatttctgaaaataatgagttgcaatggttgtcgagttctacgaaaaggttgcagtgagaattgcatcctccgtccatgtattcaatggatcgaatcacctgaagctcaaggccacgccaccgtcttcgtcgctaagttcttcggccgtgccggtttaatgtctttcatctccgccgtaccggaatctcaatgccctgctttgtttcagtctttgctatacgaagcttgtgggagaactgtgaatccggtgaacggagccgtcggattgttgtggacggggaattggaatgtttgtcaagcggcggttgagacggtgcttcgtggtggttctttaaaaccaataccggagcttcttaacggcggtggattcgccgggtttccgtctcctacttccgacgaagcttcggagatctgtacggaaatgttgaatctacgaaaagctgatgattccggtgatcggaacatttatcatcactgccgattctcaagctctagatctagatcaagatcaacagcttctccgccgaaacggaaacgattatcgtcggaacaacaaccttcgtcggagcttgatctctctcttattcctatttatccgattaaaaccttgccgtttaaggaagatacaccgtcgatgtactcggaggagtctgttaccacggtttcgtttcaaaacaacaacgccggtgatcggtacgtacgctgcggcggaggaggaggaggagcaacgacaaagttgctcaatctcttcgcttgaacggcgtcgtttttgttatgagggttaaaaatgtaatttcgagtaactttttgttgtggccttttttggattaatagcccttaatattttgtgaaatgtagcaaattacgtgatttatttctctctttaattatgagaaattatccaaagtaatagagaataatgatat

SEQ ID NO: 65 - DNA, 996 bp, Oryza sativa
gttttttctttcccttcttcaatcaaaacctatttgcatgctctcaaacccgaattaaatcgacacttttcagtttttgttttaacaagtagagtttcccaaaatattggatatatttctttttcaaatttcggaaaagaaatgagttgcaatggatgtagagttcttcgaaaaggttgcagtgaaacatgcatccttcgtccttgccttcaatggatcgaatccgccgagtcacaaggccacgccaccgtcttcgtcgctaaattctttggtcgtgctggtctcatgtctttcatctcctccgtacctgaactccaacgtcctgctttgtttcagtcgttgttgtttgaagcgtgtgggagaacggtgaatccggttaacggagcggttggtatgttgtggaccaggaactggcacgtatgccaagcggcggttgagactgttcttcgcggcggaactttacgaccgatatcagatcttcttgaatctccgtcgttgatgatctcctgtgatgagtcttcagagatttggcatcaagacgtttcaagaaaccaaacccaccattgtcgcttctccacctccagatccacgacggagatgaaagactctctggttaaccgaaaacgattgaagtccgattcggatcttgatctccaagtgaaccacggtttaaccctaaccgctccggctgtaccggttccttttcttcctccgtcgtcgttttgtaaggtggttaagggtgatcgtccgggaagtccatcggaggaatctgtaacgacgtcgtgttgggaaaatgggatgagaggagataataaacaaaaaagaaacaaaggagagaaaaagttattgaacctttttgtttaaaaccgacgacgcaaaacactcaaagattttgaggctctcttttttagggttttgagtgggaatggatatttagttaatgatttttctctatcgagaaatatgataaaattttggggaaaaaaaaaaaaaaaa

SEQ ID NO: 66 - DNA, 804 bp, Oryza sativa
ctcaaacccaaaacacattttgttttttgtttcccatctaaaatgcgtatgagttgtaacggatgtcgagttctacgaaaaggctgcagtgaaaactgtagcataagaccttgtcttcaatggatcaaatccgctgaatctcaagccaacgccaccgtcttcctcgccaagttttatggccgtgcggggctcatgaacctcctcaacaccggtcctgaccacctccgtcctgcgatatttagatcattgttgtacgaagcatgcgggaggattgtgaatccgatatacggatccgtggggttattgtggtcaggaaactggcatctttgtcaagcggccgttgaggcagtaatgagaggctcacccgtgactccgatcgcatgcgacgcagcggttactggtcaagcacctccttttaacaacaagctttgcgacataagacacgtgtcaagcagggacgagaacgttaagagacggagccgtggtgcatgcaaggaagagagaaacgtgaggtctttgagtcatgagtcgtcactgagtcacgagtcaccggtgtcttctgaggagacgacgacggaggaaccaaagacttggatcgggcttgagctgactttggggttggagcctttagcacgtggaaatcacgtggtggtaccgatgaagaaaagaaagttagagaggtgtggcacgtctgaggatgaggacacgtgtaagattgagcttggactggtgtgcagtgagtgaatggttctttttttgtggctggtcttaattacaagttttggtgttgagttttaggtgtac

SEQ ID NO: 67 - DNA, 1217 bp, Oryza sativa
ctctctccgcttcccccaaaaatccaggggcttcttacacgcacacaatcctttaaagctatcgtctttcttatataatcagtgaatcttcattaacacctcccacaaaatctcagaaataactttcacaacagagtcaaagagttccaaatcgtttgtttgtattttgtacgatcaaagttgttggtacttgtaagataatcgaaaccaaagatgcggatgagctgtaatggatgcagagttcttcggaaagggtgtagtgaggattgtagtataaggccgtgtttggcttggatcaaatcgcctgaagcgcaagctaacgcaactgtctttctcgccaagttctatggccgtgctggactcatgaacctcatcaacgccggtcccaatcaccttcgtcctgggattttccgatcgttgttgcacgaagcttgtgggaggattgtgaatccgatctatggttcggtgggtttgttgtggtcggggaattggcagctttgtcaagacgccgtggaggctgtgatgaaaggagaaccggtcaaagagatcgccacagacgctgcgacgatcggccaaggtccgcctcttaagatctacgacatccgacatatctccaaggatgataactctgccgccgcggctactggctcaaccgatttgaaacttgcgaaaactcgccgtgctaagcgggtctccaccgtcgcgatacaggcggaatcggagggaaagtctgacgaggctagtcacgattcgtcgttgagtcatcagtctgaaatagtggctgctcatgaaggagagagcaaggaatccgagagcaatgtctctgaggttttggcattctcgcctccggctgtgaagggctccggcgagataaagcttgacctaactttaaggctcgaaccggtgtcacgtgcgtatcatgtggtacctgttaagaagagaaggatcggcgtgtttggcacgtgtcagaaggagagcacgtgtaagactgagcttatgctctaagctccgttttagctatactcagaagttttgcccccatcagctctattcggctcggctctgatgatcttcaagtcgagccggtaacttttttttaatatatagttctctatttccccctttaatgttcactttccatttgtgacaaaagaatagagtatatgtacaaaattatttacagagattaattcaagaattggctgagatattatcta

SEQ ID NO: 68 - DNA, 983 bp, Oryza sativa
caaaagttgaaaaataccagctcattcacttatgactcatgagtaacttcttccttataaattcaaattgttcacaacttccttgagttccatttccgaacacaaacacacatcatacgtatatttgtcactaataaacatataaaggaatatgagaatcagctgcaacgggtgtagggttctacgcaaaggttgcaaccaagattgcaccattcgaccatgccttcaatggatcaaatccgcagactctcaagccaatgctacactcttccttgctaagttctacggtcgagccggtcttcttaacctcatcgaatccggtcctgatcaccttcgtcccgcaatatttaggtcacttctgtacgaggcttgtggtcggatcgtgaaccctgtagatggttcggttggtttgatgtggtcagggaactgggctcagtgccaagcagctgttgacgccgtgctcaacggcttacccataactcacacacctcttccaagtgcatccgcgtcgcaccagatcattcctccccacaggacttacgatatacgccacgtggctaaagatccaacaaccggcggcgacagttcggagaatctggccacacgtgtaaacgctaacaagagcaagacgcaaactggccgattcaaacgtgaatccgtgaaccaactaggtgaatgtagtcatgacatgtggcaactcccaagttctagtgctacgcatggttatggccacttcacgttggagaatgtggagagccgaagggaagctccatttaatcaaagttctccaaatcttgggtttgatgatcaagtcgatatcaacgaggttggcttagagctcagacttggttagaaccagaagattgcattattattatcataattctgtctttttaattaataatttcactttctatataaaaggagaaaaaaaaactaaagcaaatcaaatttagtattattgtcaatcattaggttatcat

SEQ ID NO: 69 - DNA, 925 bp, Linum usitatissimum
gtctccaacccccaaacactcaaaaaattatagaaaattaccagccgccggaagcagaggtgatcggaggatgagctgcaacggttgcagagtactgaggaaaggatgtggagagaattgcgtgctgaggtcatccctccgatggattcccactcctcaagcacaaggcaacccactttgttcctcgccaaattcttcggccgcagcgacctcctctcctttatctcctccgtccccgatcctcaacgccccgctctgttccagtcgctgctatttgaagcgtgtgggaggacggtgaacccggttaacggggcggtggggctgctgtggagccgcaattggcacgtgtgtcaggctgcggtcgagaccgttctcgccggaggatcactgcatccgcttccgggaattgcggcaggggttgcgccgccgaatttcgacgagtcggatgacagctgctccgccgccggattcgctgctaatcagctccgcccggcgattttggcgattactggcgggaatcggaatctatcatcgtcctcctccacctcggagtatcgacgtcgtcataatgctgctctggtcggtggtgggaatgagaggaggattaataacagagatgcgagggcgtcgttttttgcggaggaatcggaaacgacgacattcgagagcaccggcggcgatcggaagaagctgctgaatctttttgtttgagtagagaggaggaaagaaaaaagagaagccgagtttttgtcggcaaaggaaagaacaagacttgaatgcggttactggaatgtgaactgtactttgggtttctgtgttttgtttcttatgaactttatatgataatatatatacataagagagagaaagaaagaacgccggaatgacagtccggcgagttttgggggaaaaaaaaaaaaaaaaa

SEQ ID NO: 70 - protein, 201 aa, Linum usitatissimum
MWRELRAEVIPPMDSHSSSTRQPTLFLAKFFGRSDLLSFISSVPDPQRPALFQSLLFEACGRTVNPVNGAVGLLWSRNWHVCQAAVETVLAGGSLHPLPGIAAGVAPPNFDESDDSCSAAGFAANQLRPAILAITGGNRNLSSSSSTSEYRRRHNAALVGGGNERRINNRDARASFFAEESETTTFESTGGDRKKLLNLFV

SEQ ID NO: 71 - DNA, 894 bp, Triticum aestivum
atgcggcttagctgcaacggctgccgcgtgctgcggaagggctgcagcgaggactgcagcatccgcccctgcctgcagtggatcaagagccccgaggcgcaggccaacgccaccgtcttcctcgccaagttctacggccgcgcggggctcatgaacctcatcaacgccggcacggacgacagcctccgccccggcatcttccgctcgctcctctacgaggcctgcggccggatcgtcaaccccatctacggctccgtcggcctgctctggtccaacaactggcagatgtgccaggccgccgtcgaggccgtcctcagcggcaagcccatcgtccaggtctcctccgaggatgccgccgccgaccggacaccgccgctcaaggcgtacgacatccgccacgtctccacctcgccagccgccgacgggaggctccacaaggtcgccaagccgggtcgcacccgcttcaagcgcgcgtcctccgcctcgtcccaccacaacccgtccagcgactccaacaacaagcccaagcccaagccgcagcctcagacgcgggcgcccacggcggaggaggagcgggatcgtcaacaccgcaaggagatggaggagggcgcgttccagcgtgctccgagccacgaatcctccgacagccgacacgaggaccccgtggagccacactgccagcaagaggcgtccgcggacacggaggccgaggcggggtcgcacgtcagccaggcagagcaggagcagagcacagagccggccgcagagcacgcggaggaggtcgaaaaggaggacgaagaactagggctcgagctcacgcttggattcgctcccgtcgcagcacggcctgccgaattcacctgaccgtccgaaccggggggagcggctttcgcg

SEQ ID NO: 72 - DNA, 1068 bp, Medicago truncatula
atgagttgcaatgggtgccgagttcttcgaaaaggttgcagtgagtcgtgtattttacgaccttgtttgcaatggatcgaaactccagaagctcaaggccacgctactgttttcgtagcaaaattctttggtcgggctggtctcatgtccttcatttccaacgtccctgaaccacagagaccagctctgtttcagtctctactgtttgaagcgtgtgggagaacggttaaccctgtgaacggtgctgttggacttctttggactggaaactggcacgtgtgtcaagcagcagttgagacggttcttcgcggtggcacgctaaggcctttaccggagctgacacttctggacgcgcctctcactgccaccgatgaagcttctgaggcggaagacggtggtgctgatgctatgtggaagatccgagaaccgaatttcgggttggcgagctcacgatctagcaataaggtgtgttctggaagcaaacggaggagatcggaggagtttgtcaaggttccggcggcgattaatcttgatttacgattgacgccgatttttcaacagaaggcggtggaggaacgccggcatggttcgccgtcgatgacgtcggaggaatcggtgacgacgacggcgtgtttggagactgggattggagatcggtggagtcacggtggtgatcggaaagttctcaaccttttcatatgaggattttctgtatttgtgttgagcgtgactctcacgcgccgtaaagtttttctgttttgctcacaatactcattgtggtgaaaagagtaaaacggttttgtagttcggtgaattttcgtgagttaccggttcaggatttctctagagagaaagatgatggttcgtcggtgatttttttctttttgctgctaaatatgagatgtgtaaacctgtaaccgtggaatatcaaatattaaatcaaattaaataaatagtttttttttttttaatcatcgctgtttgaaatttagtagtagttggataaacattcagttattatagttcaatttgaacttcatatattttaatcatataaactcaatatta

SEQ ID NO: 73 - DNA, 1257 bp, Arabidopsis thaliana
atgtcaggagctaccaccgcttcctccggagaccacaacaacctccgtctcccaactccgacgcttgacgccgaatcgcaaactctgctgcaatcgatttctgctgaagggggttacgcttatgctcgcatggcggtgttagcggtggccggtgaccaaagcgcggcggaggcggcgcgtgatatggcttgggagcaacttcactctggtccgtggcactcggttctccccgtttggcgcgacgcttactcaatggcttgtctccacgtagctaaaatccatttcgccgccggcgagtttggtgaggcgcttggtgcgcttgatatgggtcttatcatgggaggtatgcttctccgcaaggatcttcatgattctgttttgttggtctcctctgaagctcgtaagatgacgaagagtcttgaagaagcttctggagatttcaaaggtgagagattggtcccggaagttcccgtcgacgtcaatgaggtccttaagattctaccttgcaggtctttaacttgtaaaagagtagagaagaggtctggtttatctttggaggggtttctgcgtgattattatctgccaggtacaccagttgttataaccaattctatggctcattggccagccaggaccaagtggaatcacttggactacctcaatgctgttgctggtaaccgcaccgttcccgtggaggtggggaaaaactatttgtgttctgattggaagcaagagcttgtgacattttctaagttccttgaacggatgcggaccaataaatcgtctccaatggagcctacttatcttgcccagcatcctttgtttgatcagataaatgaactgagagatgatatatgtattcctgattactgttttgtcggtggtggggaactccaatcacttaatgcatggtttggcccggctgggacagttactccgttacaccatgatccacatcataatatacttgctcaggttgttggcaagaagtatataaggctttacccatccttcctgcaagacgaactttacccttactctgagacaatgctctgcaactctagtcaggttgatctagacaatatcgacgaaaccgagttcccaaaggccatggagttggagtttatggattgtattctagaagaaggtgaaatgttgtacatccctcccaaatggtggcactatgtcaggtccttaacaatgagtctctcggttagcttctggtggagcaatgaagcagaatcttctagctcgtag

SEQ ID NO: 74 - protein, 418 aa, Arabidopsis thaliana
MSGATTASSGDHNNLRLPTPTLDAESQTLLQSISAEGGYAYARMAVLAVAGDQSAAEAARDMAWEQLHSGPWHSVLPVWRDAYSMACLHVAKIHFAAGEFGEALGALDMGLIMGGMLLRKDLHDSVLLVSSEARKMTKSLEEASGDFKGERLVPEVPVDVNEVLKILPCRSLTCKRVEKRSGLSLEGFLRDYYLPGTPVVITNSMAHWPARTKWNHLDYLNAVAGNRTVPVEVGKNYLCSDWKQELVTFSKFLERMRTNKSSPMEPTYLAQHPLFDQINELRDDICIPDYCFVGGGELQSLNAWFGPAGTVTPLHHDPHHNILAQVVGKKYIRLYPSFLQDELYPYSETMLCNSSQVDLDNIDETEFPKAMELEFMDCILEEGEMLYIPPKWWHYVRSLTMSLSVSFWWSNEAESSSS

SEQ ID NO: 75 - DNA, 2194 bp, Oryza sativa; identical to SEQ ID NO: 10

SEQ ID NO: 76 - DNA, 54 bp, Artificial sequence
  primer 1
ggggacaagtttgtacaaaaaagcaggcttaaacaatgtcaggagctaccaccg

SEQ ID NO: 77 - DNA, 50 bp, Artificial sequence
  primer 2
ggggaccactttgtacaagaaagctgggtaaaataaatccattcgctacg

SEQ ID NO: 78 - protein, 152 aa, Artificial sequence
  JMJ-C domain of SEQ ID NO: 02
TYLAQHPLFDQINELRDDICIPDYCFVGGGELQSLNAWFGPAGTVTPLHHDPHHNILAQVVGKKYIRLYPSFLQDELYPYSETMLCNSSQVDLDNIDETEFPKAMELEFMDCILEEGEMLYIPPKWWHYVRSLTMSLSVSFWWSNEAESSSS

SEQ ID NO: 79 - protein, 32 aa, Artificial sequence
  conserved box in JMJ-C domain of SEQ ID NO: 02
CILEEGEMLYIPPKWWHYVRSLTMSLSVSFWW

SEQ ID NO: 80 - protein, 23 aa, Artificial sequence
  DUF335 domain
RKMTKSLEEASGDFKGERLVPEV

SEQ ID NO: 81 - protein, 17 aa, Artificial sequence
  conserved motif
  UNSURE (11)..(11): Xaa can be any naturally occurring amino acid
ALDMGLIMGGXLLRKDL

SEQ ID NO: 82 - protein, 3 aa, Artificial sequence
  FE(II) binding consensus seq
  UNSURE (2)..(2): Xaa can be any naturally occurring amino acid
  VARIANT (3)..(3): /replace = "Val"
HXD

SEQ ID NO: 83 - DNA, 1290 bp, Arabidopsis thaliana
atgtcaggagctaccaccgcttcctccggagaccacaacaacctccgtctcccaactccgacgcttgacgccgaatcgcaaactctgctgcaatcgatttctgctgaagggggttacgcttatgctcgcatggcggtgttagcggtggccggtgaccaaagcgcggcggaggcggcgcgtgatatggcttgggagcaacttcactctggtccgtggcactcggttctccccgtttggcgcgacgcttactcaatggcttgtctccacgtagctaaaatccatttcgccgccggcgagtttggtgaggcgcttggtgcgcttgatatgggtcttatcatgggaggtatgcttctccgcaaggatcttcatgattctgttttgttggtctcctctgaagctcgtaagatgacgaagagtcttgaagaagcttctggagatttcaaaggtgagagattggtcccggaagttcccgtcgacgtcaatgaggtgagacatgttttggctaatctacaattacttgtccttaagattctaccttgcaggtctttaacttgtaaaagagtagagaagaggtctggtttatctttggaggggtttctgcgtgattattatctgccaggtacaccagttgttataaccaattctatggctcattggccagccaggaccaagtggaatcacttggactacctcaatgctgttgctggtaaccgcaccgttcccgtggaggtggggaaaaactatttgtgttctgattggaagcaagagcttgtgacattttctaagttccttgaacggatgcggaccaataaatcgtctccaatggagcctacttatcttgcccagcatcctttgtttgatcagataaatgaactgagagatgatatatgtattcctgattactgttttgtcggtggtggggaactccaatcacttaatgcatggtttggcccggctgggacagttactccgttacaccatgatccacatcataatatacttgctcaggttgttggcaagaagtatataaggctttacccatccttcctgcaagacgaactttacccttactctgagacaatgctctgcaactctagtcaggttgatctagacaatatcgacgaaaccgagttcccaaaggccatggagttggagtttatggattgtattctagaagaaggtgaaatgttgtacatccctcccaaatggtggcactatgtcaggtccttaacaatgagtctctcggttagcttctggtggagcaatgaagcagaatcttctagctcgtag

SEQ ID NO: 84 - protein, 429 aa, Arabidopsis thaliana
MSGATTASSGDHNNLRLPTPTLDAESQTLLQSISAEGGYAYARMAVLAVAGDQSAAEAARDMAWEQLHSGPWHSVLPVWRDAYSMACLHVAKIHFAAGEFGEALGALDMGLIMGGMLLRKDLHDSVLLVSSEARKMTKSLEEASGDFKGERLVPEVPVDVNEVRHVLANLQLLVLKILPCRSLTCKRVEKRSGLSLEGFLRDYYLPGTPVVITNSMAHWPARTKWNHLDYLNAVAGNRTVPVEVGKNYLCSDWKQELVTFSKFLERMRTNKSSPMEPTYLAQHPLFDQINELRDDICIPDYCFVGGGELQSLNAWFGPAGTVTPLHHDPHHNILAQVVGKKYIRLYPSFLQDELYPYSETMLCNSSQVDLDNIDETEFPKAMELEFMDCILEEGEMLYIPPKWWHYVRSLTMSLSVSFWWSNEAESSSS

SEQ ID NO: 85 - DNA, 1518 bp, Arabidopsis thaliana
atgccgacgggatgcgagtttccgatgatcaaaaccttcgagaatgctcttactgccgccgacttcgagtctaccgtcgagctcaccaacttcccagcagtttttcggggatgtgctagtgtctgggatgcgtattctaagtggaatccattcaacagtggcctcgattatctggaggaacgtgcaggttcagttgaagtggaggcaatgctttcgaggacggctccagttttcaatggtgatatcagaagccatgagagggtgtcattgcctttctcggattttatcagattctgcaagcagcatatgagaggcaaagggaatggttctggtgttgatgctaagtctgcagatttaaatcctatgtgtgaggactatagacctggacaaatatacctagcacagtttccaattctgaatgatgagaaagaagagaaggttctacttaagattctgagacaagatatccagacgcccacatttttagacgcaaagtcactttcttctatcaacttttggatgaattctgcagaagctcgatcaagtacccactatgatccacatcataaccttctatgcgtagtctcagggcgtaaaaaagttgtattgtggcccccttccgccagtccctcgctctacccgatgcctatatacggagaagcatcaaaccatagttcggttggtctagaaaatccaaatttatcagattatccaagagcagagcattcactgaagcagtcacaggagattactcttaacgctggtgatgcagtattcattcctgaaggttggttccatcaggtggatagtgatgaactgactgttgctgtcaacttttggtggcaatcaaactatatgtctaacatgcctgaacacatggattcgtattatctgcgtcgaatcacaagaagattgatagacagagaaatgagcctgttagtctcgaagccttcttcaactgatttaaggcacctgtctgagcatattgaccaatctcgcattgagatggcagaaggtgggaatgataatataggcaatgaaagcattaaaaagggcctcagcacattgcatgaaaaagcgtcgctgcacgatctagatccttctgcttcccaggcgcttcatgatcttatttctttagtccatgaccacgttaatgctgttgatacaaaagatgatcgcgttgcccatttgctttggaatcttgaagcctctagacttcgggatgttctccttgcaatggcacgttatttcccaagaactttagaagcattaatactccacatgctctcacccattgctgcggaagttctaacacagaagtttgatgagattgaccaacagactggtgaagaagataggacccagttctttcgggaattttatagtgcattcgatgatgaagcagctgcgatggatataattttaagtaggaaagaggcttttgcatttcaggcatttaagaatgtactagacaagtttttgggggtcaacattgcttcaccaacaacaaacatttga

SEQ ID NO: 86 - protein, 505 aa, Arabidopsis thaliana
MPTGCEFPMIKTFENALTAADFESTVELTNFPAVFRGCASVWDAYSKWNPFNSGLDYLEERAGSVEVEAMLSRTAPVFNGDIRSHERVSLPFSDFIRFCKQHMRGKGNGSGVDAKSADLNPMCEDYRPGQIYLAQFPILNDEKEEKVLLKILRQDIQTPTFLDAKSLSSINFWMNSAEARSSTHYDPHHNLLCVVSGRKKVVLWPPSASPSLYPMPIYGEASNHSSVGLENPNLSDYPRAEHSLKQSQEITLNAGDAVFIPEGWFHQVDSDELTVAVNFWWQSNYMSNMPEHMDSYYLRRITRRLIDREMSLLVSKPSSTDLRHLSEHIDQSRIEMAEGGNDNIGNESIKKGLSTLHEKASLHDLDPSASQALHDLISLVHDHVNAVDTKDDRVAHLLWNLEASRLRDVLLAMARYFPRTLEALILHMLSPIAAEVLTQKFDEIDQQTGEEDRTQFFREFYSAFDDEAAAMDIILSRKEAFAFQAFKNVLDKFLGVNIASPTTNI

SEQ ID NO: 87 - DNA, 1038 bp, Arabidopsis thaliana
atggctaaagagatagagaatttatggagagaagtgagagaattgagcttaggaactaaaatcgatcgttttgattctcaaccgtctccggtgaagtttctccgaaactacgtgtctcagagcaagccttgtgtaatctccaaagctattactcattggccggcgttaaaactctggtcagatccggcttacctcaccggagctttgtcagatgacgttgtctcgctacatctcactcctaacggctgcgcagacgccgtcaccggagatagtgatctttgtttcgcttcggctcatgttgagaaagttctgttcccggaggctcttaaggttgttcaatcgtcgtgtaaaggactgaaggttgggtatttgcaacagcaaaacgattgttttagaacggagtattcgacggttgcgttagactgcgacggtgatattgagtgggctacggaggcatttggttgttcgccggaagctgtgaacctttggattggtactgatgactccgtgacttcatttcataaagatcactatgagaatctttacgctgttgtttcaggggagaaacatttccttcttcttcctccgactgatgttcaccgtctctatatcgaacagtatccggcagctaattactcttaccaccgagatactgatgcgttcaagcttgaggttgaggagccggttaggcatgtaccttggtctagtgttgatccatacccttcgccagagaaggaagcaagcgagagattgaaatttccgttgttctttgatggcccgaagccgtttcattgtactgtcaaggctggcgaggttctttacctgccaagcatgtggtttcaccatgttagtcaaaccccaggagatggaggttataccattgcagtgaactattggtatgacatgcagtttgacatcaagtatgcttattttaacttcttgcaatctttattatacaagtcatcttcactcaatccagttctttcttggagagaagacgaagattcagaatccagtgatgcagagattgctccctga

SEQ ID NO: 88 - protein, 431 aa, Arabidopsis thaliana
MAKEIENLWREVRELSLGTKIDRFDSQPSPVKFLRNYVSQSKPCVISKAITHWPALKLWSDPAYLTGALSDDVVSLHLTPNGCADAVTGDSDLCFASAHVEKVLFPEALKVVQSSCKGLKVGYLQQQNDCFRTEYSTVALDCDGDIEWATEAFGCSPEAVNLWIGTDDSVTSFHKDHYENLYAVVSGEKHFLLLPPTDVHRLYIEQYPAANYSYHRDTDAFKLEVEEPVRHVPWSSVDPYPSPEKEASERLKFPLFFDGPKPFHCTVKAGEVLYLPSMWFHHVSQTPGDGGYTIAVNYWYDMQFDIKYAYFNFLQSLLYKSSSLNPVLSWREDEDSESSDAEGSKFTPSATNLYLSSTYVSDGARFWKRVHVNSIKLGFESNGLIQSGLIDMYRKYRLVINAEKVFRAMEGQTVLTVGGYGFEYYAEWFSH

SEQ ID NO: 89 - DNA, 1142 bp, Medicago truncatula
atgaatgagaagatagaagaactatggagagaagtacgagaattaagtctaggaagcaaaagaagcatagaacgtttagaatcagcaccaacaccactccaattccatagaaacttcatcactccaaacaaaccttgcatcatctccaactccatctcccattggccctccctctctctctggtcccacccttcttacctcactcaatccctctcttccaccaccgtctccctccatctcacccccaccggctccgccgactctttaacccctctcccctcttccccctcctccctctgcttcgcctctgcccatgtccaaaacctccctttccccgaagccctccgtctcatcaactcctctaacccttcccaatgtgtcgcctacgcgcagcaacagaacgattgttttcgttcagagtatgattccattgttaaagattgtgatcaacatattgcttgggctactgaagcatttggtttagagcctgaagctgttaatctttggattggaaacaaacattcatctacttggtttcataaggatcattatgagaatctttatgctgttgttactggtcaaaaacactttcttttgtttcctcctactgatgttcatcgcttttatattcggaattaccctgctgctacttataaatattacatggaaactggagagtttgatttggaacttgacaagccaactaggtatgtgccttggtgtagtgtgaacccttttccttctccggagaacttggaggacgagatttcaaagtttcctttatacttcaatggccctccaccgtttgagtgtactgtcaaggctggggagattctttacttgtatgattctcttcttttgcattgcatcatgccaagcatgtggtttcatcatgttagacaaagtggggatgatggagaattaactattgcagtaaattattggtatgatatgcaatttgacattaagtatgcttatttcaactttttacaatctattgattaccgatctcctacgagtccaatgatgcctgagaaattgtgtgaggagatagattttggtcctgatgacgatgagactagatgaattatcatttctcagtcggtgatattcggcaatgtggtccttcgatcgaatgctga

SEQ ID NO: 90 - protein, 361 aa, Medicago truncatula
MNEKIEELWREVRELSLGSKRSIERLESAPTPLQFHRNFITPNKPCIISNSISHWPSLSLWSHPSYLTQSLSSTTVSLHLTPTGSADSLTPLPSSPSSLCFASAHVQNLPFPEALRLINSSNPSQCVAYAQQQNDCFRSEYDSIVKDCDQHIAWATEAFGLEPEAVNLWIGNKHSSTWFHKDHYENLYAVVTGQKHFLLFPPTDVHRFYIRNYPAATYKYYMETGEFDLELDKPTRYVPWCSVNPFPSPENLEDEISKFPLYFNGPPPFECTVKAGEILYLYDSLLLHCIMPSMWFHHVRQSGDDGELTIAVNYWYDMQFDIKYAYFNFLQSIDYRSPTSPMMPEKLCEEIDFGPDDDETR

SEQ ID NO: 91 - DNA, 1071 bp, Brachypodium sylvaticum
tcaatcgttcttctcctcaagatcaccttccaaggcagcatctttgttgtccagcggagaattactgatctccagtgacctcaggaagttaaagtacgcatacttgatgtcaaactgcatgtcataccagtaattcacagcaatggtgagcccgttaggcccggggctctggctgacatggtgaaaccacatgctcggcaagtagagcacctcgccagcacggacggtgcaccgtatcggcctgggcccctcgaagtagagcgggaaggatgagacctgcgccgccatctcctccggcgacgacgggttcgggtccacgctgctccacggcacgatcctctcgggctcttccatctccagcttaagccccgtcagctcctcctctccttcgttctccgtgacgtagcgggcggcggggtagtcgcggacgtagaggcggtggtgctcggtggggggcaagaggaggaaatgcttctcgccggagaggacggcgtagacgttgtcgtagtggtccttgtggaaggaggtgacggagcaggagttgccgatccagaggttgacggcctccgggaggcagccgagcgcctcgctggcccagggcacgtgcgcgtccacgtcgccggccaccgccgcgtactccccgcgcaggcagtcgtcctgctgctgcgcgtacgccaccaggccgccagcggccgcccggtcggagcccctgatgagccgcacggcggtagggaagtcgacccggcggacgtgcgcggacgcgaagcacctggcgccggggaggcacgggtgaggggcgagggcgtcggcgcggccgtcgggggtgaggtggacggagacgtcggtggagcggagcgcgtcggtgaggtaggattcggtgggccagagggaggcggcgggccagtggcgggtggcggcggcggagacgaggagcgggcggcccggggagacgtggtcgcggaggaaggcgagcggggtcgggggcaggtcggcgcgcggcacggcctccggagagtggagacccagcaggtcccgtgattccgcccacagctcccgcaccgcgcgctccat

SEQ ID NO: 92 - protein, 356 aa, Brachypodium sylvaticum
MERAVRELWAESRDLLGLHSPEAVPRADLPPTPLAFLRDHVSPGRPLLVSAAATRHWPAASLWPTESYLTDALRSTDVSVHLTPDGRADALAPHPCLPGARCFASAHVRRVDFPTAVRLIRGSDRAAAGGLVAYAQQQDDCLRGEYAAVAGDVDAHVPWASEALGCLPEAVNLWIGNSCSVTSFHKDHYDNVYAVLSGEKHFLLLPPTEHHRLYVRDYPAARYVTENEGEEELTGLKLEMEEPERIVPWSSVDPNPSSPEEMAAQVSSFPLYFEGPRPIRCTVRAGEVLYLPSMWFHHVSQSPGPNGLTIAVNYWYDMQFDIKYAYFNFLRSLEISNSPLDNKDAALEGDLEEKND

SEQ ID NO: 93 - DNA, 1080 bp, Oryza sativa
atggagcgcgcagtgcgggagctgtgggcggagtcgcgggacctgctgggcctccactccccggacgacgccgccgccgccgacgccgcgatgccccgcgccgagatgcccccgacgccgctcgcgtttctccgcgaccacgtctcgccggggcgccctctcctcgtgtcctccgccgccaccagccactggccggccgcctcgctgtggccgaccgactcctacctcaccgacgcgctccgctccaccgccgtctcgctccacctcacccccgacggccgcgccgacgccctcgccccgcacccgcgcccgagccaccccggcgccaagtgcttcgcctccgcgcacgtccgccaggtcgacttccccaccgccgtgcgcctcatccggagctccgatccggcctccggcctggtggcctacgcgcagcagcaggacgactgcctgcgcggggagtacgccgccgtcgccggcgacgtggacgcgcacgtgccctgggccagcgacgcgctcggctgcctccccgaggccgtcaacctctggatcggcagcgcctgctcccagacctccttccacaaggaccactacgacaacatctacgtcgtcgtctccggcgagaagcacttcctcctcttgccccccaccgagcaccaccgcctctacgtccgcgactaccccgccgcccactacgccgcggaagatgaagcggagctgaggcttaagctggagctggaggagcccgagaggatcgtgccatggagcagcgttgacccctacccgccgtcgccggaggaggcggccgcgcaggcgtcatccttcccgctctacttcgaggggccgaggccgatccgctgcacggtgcgcgccggcgagatgctctacttgccgagcatgtggtttcaccatgtgagccagagccccgggccgaacgggctcaccattgcagtgaactactggtatgacatgcagtttgacattaagtatgcctacttcaacttcttgaggtcattggagatcgatggtagttcgtcgaaaaagacggatgctttggaagacgatctcgaggagacgaatgattga

SEQ ID NO: 94 - protein, 354 aa, Oryza sativa
MERAVRELWAESRDLLGLHSPDDAAAADAAMPRAEMPPTPLAFLRDHVSPGRPLLVSSAATSHWPAASLWPTDSYLTDALRSTAVSLHLTPDGRADALAPHPRPSHPGAKCFASAHVRQVDFPTAVRLIRSSDPASGLVAYAQQQDDCLRGEYAAVAGDVDAHVPWASDALGCLPEAVNLWIGSACSQTSFHKDHYDNIYVVVSGEKHFLLLPPTEHHRLYVRDYPAAHYAAEDEAELRLKLELEEPERIVPWSSVDPYPPSPEEAAAQASSFPLYFEGPRPIRCTVRAGEMLYLPSMWFHHVSQSPGPNGLTIAVNYWYDMQFDIKYAYFNFLRSLEIDGSSSKKTDALEDDL

SEQ ID NO: 95 - DNA, 3552 bp, Arabidopsis thaliana
atggggacagagctaatgagaatctgtgtgaaagaagatagtgatgatttgccatctgttcctcctggttttgaatcatatgcaacttttaccttaaaaagagtagtccctgctactacttctgataaagccaagactcctgcaattgaaagtgtttctgcaaccgaacaagctaagatggaagttgaatctgatgaagccaaagctgctcgggctctacgccgtagaccttggattaatcatagcggatgtgatgatgatggtgattgtgctgcaaacaatgacaatgctgcatctcaaaatcctgatcaaaattgtgatgtgaagccagctcttccaaagggtgtggtcaggggatgtgaagaatgtaaagattgtcagaaggagtttgaagacactttaaattatatcgctaaaataagaccggaggctgaaaagtatggaatctgtcgcattgttcctcctccttcctggaaaccgccgtgcccactgaaagaaaagcaagtatgggagggttctaaatttacaacacgtgtccaaagagttgataaacttcagaatcggagttcaatgaagaagatttcaaagcttcctaatcaaatgagaaagaagaaaagaaagtgcatgaaaatgggaatggattctgtcactaatggtatgggcgatccctgttctgcaagcactggaatgaatgaacttgagacgtttgggtttgaacctggtccagggttcacactaaaagacttccaaaaatatgctgatgagttcaaggctcagtactttaaaaagagtgaaacttctacagacgataaatgtaaagttgataattcaatagactgctgggagccagcacttgaggatgttgaaggtgaatattggcggatagtagataaagcaactgaagagatagaggtgctatatggtgctgaccttgaaactggggtatttggtagcggattccccaagatatcatcaagtcacaatgcttcttcttcagaagataaatatgcaaaatcaggctggaacttaaataactttccaaggcttccgggatccctccttaagtacgagggcagtgatatttccggtgtccttgtgccgtggctgtatattgggatgtgcttttcttctttctgctggcatgttgaagatcaccacttgtattcgttgaattatatgcactggggtgcaccgaaattgtggtatggtgttggggggaaggatgctgttaaactcgaggaggcaatgaggaagcatttgcctgacctttttgaagaacagcctgacttacttcataagctagttacacaactctccccgtcaaaactgaaaaccgcaggagtacctgtgcaccgttgcgtccagcatgctggagagtttgtcttgacttttcctcgggcatatcatgctggatttaattctggtttcaactgtgctgaagctgtgaatgtagcacccgttgactggttacctcatgggcagattgccatagagttatactgtcaacagggtagaaaaacgtccatctcgcatgataaattgttgcttggggcagcaagggaagtagtgaaagccgactgggagctgaacttactaaggaaaaatactgtagataacttaaggtggaaagcattcagtgcgaaggatggaattttggcaaaaacattaaaggcacgcattgacatggaacgtacgagaagagaatttctgtgcaactcttcacttgcattgaaaatgcacagtaatttcgatgctaccaacgagagagagtgctgtatatgcttctttgatttgcacctgtctgctgctggctgtcgttgttccccggagaagtattcatgtttgactcatgtgaaggagttgtgttcatgtccatgggttactaaatattttctatttcgctatgatatcgatgaactgaatgttcttgttgaggcagtggaaggaaaactgagttctgtatatagatgggcgcgtcaagatttaggattggcattaagtacagacgtctcaggaagcaagatggagatagatgaagaaggaaaagtccacaaggacccgactccacaaacaactgcactttcagggaaggatttgcagttgaaagtaacatcgaaagaagtaagtaaagagttagaaaagactagtaaattatctcatgttaatttacttctgaaagaaaaggaggagcaaataacgtcaagtcactgtatgaagcctgtcaaagaagaaactgtttgtgattcttctgatccaaacgtttcagcttgccaaccatctgaaggaggcataatctgtatgacagctgttaagtccgcaagtggtaaaaagaattcacagagtctacccaatgatgtgatactcctcagcgatgatgagtatgacatacctaggaaacgaggttctgtgagaagagatgcaatttcttctggcaagaaattagaaatacgagagagaccgacccacgttttggcgttagaagcttctgccaaaattgctgctccaatttgccaaagggaaggagattcgctgcgtgatacacgaaacactatatcattgcctactaatgaccaaaaaacaatgagaagggatgtaccgagttctacttcgcacgcggaagttaatgcggaggctactgggcttactcaagatatatgtaacagaatggcaactaacagccacggtggtggaaaacctactagttgtaaatccaaaaactctggaggtttggctatagtggatgttgtggatgggacaagaagtagttcaggtacaccgtcttgttcgcaaaataatagtccggataggttcatccgccaaaagggtccccgcattgcaaaggtcgtgaggagaatcaattgcaatgtagagcctttaagttatggatgtgtgctgtctggaaaatcatggtgcagccggcgagcaatttttcctaaaggatttcgtagccgggttaagtacataaacattttggatccaacaaatatgtgcttctacatttcagaaattctggatgctggacgcaacagtccattgttcatggtttacttggagagtaatcccagtgaggtgttcgttcatatgtcgcctacaagatgctgggagatggtaagagagagagtaaatcaagagataactaagcagcacaaagctggaaaatcagatcttcctcctttgcaaccctctgggagtcccgacggttttgaaatgtttggatattcgtcacccgcaatcgtacaggctatcgaagcattagacgtgaatcgagtttgcacagactattgggattccaggccttattcccggccacaagttcagttccctgcaaatcctcttctcagagaagccaacacaagtggcagatcgaatgtgggaaatctccagctaaaccctggacaccatatatcgcctactggaataaattctattcttaaagttctgttcaagaaagctagcatggaggaactaagctcacttcaagaggttttaagtgagactaactcagatatggtgaccgaacttgtgaaggaagagatccagaaccgtcgctga

SEQ ID NO: 96 - protein, 1183 aa, Arabidopsis thaliana
MGTELMRICVKEDSDDLPSVPPGFESYATFTLKRVVPATTSDKAKTPAIESVSATEQAKMEVESDEAKAARALRRRPWINHSGCDDDGDCAANNDNAASQNPDQNCDVKPALPKGVVRGCEECKDCQKEFEDTLNYIAKIRPEAEKYGICRIVPPPSWKPPCPLKEKQVWEGSKFTTRVQRVDKLQNRSSMKKISKLPNQMRKKKRKCMKMGMDSVTNGMGDPCSASTGMNELETFGFEPGPGFTLKDFQKYADEFKAQYFKKSETSTDDKCKVDNSIDCWEPALEDVEGEYWRIVDKATEEIEVLYGADLETGVFGSGFPKISSSHNASSSEDKYAKSGWNLNNFPRLPGSLLKYEGSDISGVLVPWLYIGMCFSSFCWHVEDHHLYSLNYMHWGAPKLWYGVGGKDAVKLEEAMRKHLPDLFEEQPDLLHKLVTQLSPSKLKTAGVPVHRCVQHAGEFVLTFPRAYHAGFNSGFNCAEAVNVAPVDWLPHGQIAIELYCQQGRKTSISHDKLLLGAAREVVKADWELNLLRKNTVDNLRWKAFSAKDGILAKTLKARIDMERTRREFLCNSSLALKMHSNFDATNERECCICFFDLHLSAAGCRCSPEKYSCLTHVKELCSCPWVTKYFLFRYDIDELNVLVEAVEGKLSSVYRWARQDLGLALSTDVSGSKMEIDEEGKVHKDPTPQTTALSGKDLQLKVTSKEVSKELEKTSKLSHVNLLLKEKEEQITSSHCMKPVKEETVCDSSDPNVSACQPSEGGIICMTAVKSASGKKNSQSLPNDVILLSDDEYDIPRKRGSVRRDAISSGKKLEIRERPTHVLALEASAKIAAPICQREGDSLRDTRNTISLPTNDQKTMRRDVPSSTSHAEVNAEATGLTQDICNRMATNSHGGGKPTSCKSKNSGGLAIVDVVDGTRSSSGTPSCSQNNSPDRFIRQKGPRIAKVVRRINCNVEPLSYGCVLSGKSWCSRRAIFPKGFRSRVKYINILDPTNMCFYISEILDAGRNSPLFMVYLESNPSEVFVHMSPTRCWEMVRERVNQEITKQHKAGKSDLPPLQPSGSPDGFEMFGYSSPAIVQAIEALDVNRVCTDYWDSRPYSRPQVQFPANPLLREANTSGRSNVGNLQLNPGHHISPTGINSILKVLFKKASMEELSSLQEVLSETNSDMVTELVKEEIQNRR

SEQ ID NO: 97 - DNA, 2793 bp, Arabidopsis thaliana
atgaatgctaatgagcaaactcgatccgccaatggcattggcaatggcaatggtgagtctattcccgggattccagatgacttacggtgcaagagatcggatggtaaacagtggagatgcactgcaatgtccatggctgataagactgtttgtgagaagcactacatccaagcaaagaagcgggcggctaattctgctttcagggcgaaccagaagaaagcgaaaaggcgatcatcgttaggcgaaacagatacgtattcggaagggaagatggatgatttcgagttaccagtcaccagcattgaccactataataacggtcttgcctctgcttccaagagtaatggtagactagagaagagacataataaaagcctgatgcggtactcgcccgagacaccgatgatgaggagtttctctccacgtgttgcagtggatttgaatgatgacttgggtagagatgttgtaatgtttgaagagggctacagatcttataggacaccaccatctgttgctgttatggatccgacacgaaacagatcacaccaaagcaccagtcctatggaatactcagcagcaagcacagatgtgtctgcagagtctttgggggaaatctgccatcaatgccagagaaaagatagagagagaatcatttcttgcctcaaatgcaatcaaagagccttctgccacaattgtctatcggcaaggtactcggagatatcacttgaagaagtcgagaaagtttgccctgcatgtcgtggcttgtgtgattgcaaatcttgcctgcgttcagataatacaataaaggttcggatccgggaaatacccgttttggacaagttgcagtatctttatcgtctattatcagctgtcctaccagtcataaagcagatccatcttgaacaatgtatggaagttgaactagagaagaggcttcgtgaagttgagattgatcttgtcagggcaagattgaaagcagatgagcagatgtgctgcaacgtgtgtcggataccagttgttgactactaccgtcactgtccgaactgctcatatgacctttgcctgagatgctgtcaagatctacgggaagagtcttcagtgacgattagtgggactaaccaaaacgtacaagatagaaaaggagctcccaaactaaaactaaacttttcatacaagtttcctgagtgggaagccaacggtgatgggagcatcccttgccctcctaaggagtatggaggctgcggttcacattctttgaatcttgcccgcattttcaagatgaattgggttgcaaagcttgtgaaaaatgctgaggagattgttagtggctgcaaattatctgatcttctgaaccctgatatgtgtgattcaagattctgcaaatttgctgagagagaagagagcggtgacaactacgtgtacagcccgtcgcttgaaacgattaaaactgatggagtagctaagtttgagcaacaatgggcagagggtcggcttgttactgtgaaaatggtacttgatgactcatcttgctctagatgggatcctgagactatttggagggatatagacgagctttcggacgagaaactgagagaacatgatccattcttgaaggccattaattgcttggatggtttagaggttgatgtaagacttggggagtttacaagagcatataaagatggaaagaaccaagagacaggtcttccgctattgtggaagttaaaggactggccgagcccaagtgcttccgaggagttcattttctaccaaagacctgagtttatcagaagttttccgtttctcgagtacattcatccccggttaggccttctgaatgttgcagccaagttacctcattactcgctccaaaacgattcaggtccaaagatttatgtgtcttgtgggacgtaccaagaaatcagtgctggcgattcattgactggtattcactacaacatgcgtgacatggtatacctattggtgcacacgtctgaagaaacaacattcgaaagggtgagaaaaacaaaacctgttccagaggaacctgaccagaagatgagcgaaaatgagtcacttcttagccctgagcagaaattaagggacggagagttacatgatctatcacttggtgaagccagtatggagaagaatgaacctgagttggcgttgactgtgaatccagagaacttaacggaaaacggtgacaacatggaatcttcttgcacatcttcatgtgcaggaggagcccagtgggatgtctttcgacgccaagacgtcccaaagttgtccgggtatttgcagagaacattccagaagcctgataatatccagactgattttgtgtcacgcccgttgtatgaaggattgttcttaaatgaacaccacaagagacaactaagagacgagtttggagttgagccatggacatttgagcaacatcgtggtgaggctatcttcattccggctggatgtccgttccaaatcactaatcttcagtcgaatattcaggtggcacttgacttcttgtgccctgaaagcgttggagagtcagcaagactagctgaagaaatccggtgtttaccaaacgaccacgaggcaaaacttcagattctagagattggaaagatatcattatacgcagctagctcagccattaaagaggttcagaaactggtcttggatccaaagtttggagcagagcttggatttgaagactctaacttaaccaaagcagtctctcacaacttagacgaggcaaccaagcggccgcagcaaaacagctgcacttaa

SEQ ID NO: 98 - protein, 930 aa, Arabidopsis thaliana
MNANEQTRSANGIGNGNGESIPGIPDDLRCKRSDGKQWRCTAMSMADKTVCEKHYIQAKKRAANSAFRANQKKAKRRSSLGETDTYSEGKMDDFELPVTSIDHYNNGLASASKSNGRLEKRHNKSLMRYSPETPMMRSFSPRVAVDLNDDLGRDVVMFEEGYRSYRTPPSVAVMDPTRNRSHQSTSPMEYSAASTDVSAESLGEICHQCQRKDRERIISCLKCNQRAFCHNCLSARYSEISLEEVEKVCPACRGLCDCKSCLRSDNTIKVRIREIPVLDKLQYLYRLLSAVLPVIKQIHLEQCMEVELEKRLREVEIDLVRARLKADEQMCCNVCRIPVVDYYRHCPNCSYDLCLRCCQDLREESSVTISGTNQNVQDRKGAPKLKLNFSYKFPEWEANGDGSIPCPPKEYGGCGSHSLNLARIFKMNWVAKLVKNAEEIVSGCKLSDLLNPDMCDSRFCKFAEREESGDNYVYSPSLETIKTDGVAKFEQQWAEGRLVTVKMVLDDSSCSRWDPETIWRDIDELSDEKLREHDPFLKAINCLDGLEVDVRLGEFTRAYKDGKNQETGLPLLWKLKDWPSPSASEEFIFYQRPEFIRSFPFLEYIHPRLGLLNVAAKLPHYSLQNDSGPKIYVSCGTYQEISAGDSLTGIHYNMRDMVYLLVHTSEETTFERVRKTKPVPEEPDQKMSENESLLSPEQKLRDGELHDLSLGEASMEKNEPELALTVNPENLTENGDNMESSCTSSCAGGAQWDVFRRQDVPKLSGYLQRTFQKPDNIQTDFVSRPLYEGLFLNEHHKRQLRDEFGVEPWTFEQHRGEAIFIPAGCPFQITNLQSNIQVALDFLCPESVGESARLAEEIRCLPNDHEAKLQILEIGKISLYAASSAIKEVQKLVLDPKFGAELGFEDSNLTKAVSHNLDEATKRPQQNSCT

SEQ ID NO: 99 - DNA, 2793 bp, Arabidopsis thaliana; identical to SEQ ID NO: 97

SEQ ID NO: 100 - protein, 930 aa, Arabidopsis thaliana; identical to SEQ ID NO: 98

SEQ ID NO: 101 - DNA, 2835 bp, Arabidopsis thaliana
atgcaggtcaattttgatgaaacttgtgattcagtgattagaatgaatgctaatgagcaaactcgatccgccaatggcattggcaatggcaatggtgagtctattcccgggattccagatgacttacggtgcaagagatcggatggtaaacagtggagatgcactgcaatgtccatggctgataagactgtttgtgagaagcactacatccaagcaaagaagcgggcggctaattctgctttcagggcgaaccagaagaaagcgaaaaggcgatcatcgttaggcgaaacagatacgtattcggaagggaagatggatgatttcgagttaccagtcaccagcattgaccactataataacggtcttgcctctgcttccaagagtaatggtagactagagaagagacataataaaagcctgatgcggtactcgcccgagacaccgatgatgaggagtttctctccacgtgttgcagtggatttgaatgatgacttgggtagagatgttgtaatgtttgaagagggctacagatcttataggacaccaccatctgttgctgttatggatccgacacgaaacagatcacaccaaagcaccagtcctatggaatactcagcagcaagcacagatgtgtctgcagagtctttgggggaaatctgccatcaatgccagagaaaagatagagagagaatcatttcttgcctcaaatgcaatcaaagagccttctgccacaattgtctatcggcaaggtactcggagatatcacttgaagaagtcgagaaagtttgccctgcatgtcgtggcttgtgtgattgcaaatcttgcctgcgttcagataatacaataaaggttcggatccgggaaatacccgttttggacaagttgcagtatctttatcgtctattatcagctgtcctaccagtcataaagcagatccatcttgaacaatgtatggaagttgaactagagaagaggcttcgtgaagttgagattgatcttgtcagggcaagattgaaagcagatgagcagatgtgctgcaacgtgtgtcggataccagttgttgactactaccgtcactgtccgaactgctcatatgacctttgcctgagatgctgtcaagatctacgggaagagtcttcagtgacgattagtgggactaaccaaaacgtacaagatagaaaaggagctcccaaactaaaactaaacttttcatacaagtttcctgagtgggaagccaacggtgatgggagcatcccttgccctcctaaggagtatggaggctgcggttcacattctttgaatcttgcccgcattttcaagatgaattgggttgcaaagcttgtgaaaaatgctgaggagattgttagtggctgcaaattatctgatcttctgaaccctgatatgtgtgattcaagattctgcaaatttgctgagagagaagagagcggtgacaactacgtgtacagcccgtcgcttgaaacgattaaaactgatggagtagctaagtttgagcaacaatgggcagagggtcggcttgttactgtgaaaatggtacttgatgactcatcttgctctagatgggatcctgagactatttggagggatatagacgagctttcggacgagaaactgagagaacatgatccattcttgaaggccattaattgcttggatggtttagaggttgatgtaagacttggggagtttacaagagcatataaagatggaaagaaccaagagacaggtcttccgctattgtggaagttaaaggactggccgagcccaagtgcttccgaggagttcattttctaccaaagacctgagtttatcagaagttttccgtttctcgagtacattcatccccggttaggccttctgaatgttgcagccaagttacctcattactcgctccaaaacgattcaggtccaaagatttatgtgtcttgtgggacgtaccaagaaatcagtgctggcgattcattgactggtattcactacaacatgcgtgacatggtatacctattggtgcacacgtctgaagaaacaacattcgaaagggtgagaaaaacaaaacctgttccagaggaacctgaccagaagatgagcgaaaatgagtcacttcttagccctgagcagaaattaagggacggagagttacatgatctatcacttggtgaagccagtatggagaagaatgaacctgagttggcgttgactgtgaatccagagaacttaacggaaaacggtgacaacatggaatcttcttgcacatcttcatgtgcaggaggagcccagtgggatgtctttcgacgccaagacgtcccaaagttgtccgggtatttgcagagaacattccagaagcctgataatatccagactgattttgtgtcacgcccgttgtatgaaggattgttcttaaatgaacaccacaagagacaactaagagacgagtttggagttgagccatggacatttgagcaacatcgtggtgaggctatcttcattccggctggatgtccgttccaaatcactaatcttcagtcgaatattcaggtggcacttgacttcttgtgccctgaaagcgttggagagtcagcaagactagctgaagaaatccggtgtttaccaaacgaccacgaggcaaaacttcagattctagagattggaaagatatcattatacgcagctagctcagccattaaagaggttcagaaactggtcttggatccaaagtttggagcagagcttggatttgaagactctaacttaaccaaagcagtctctcacaacttagacgaggcaaccaagcggccgcagcaaaacagctgcacttaa

SEQ ID NO: 102 - protein, 944 aa, Arabidopsis thaliana
MQVNFDETCDSVIRMNANEQTRSANGIGNGNGESIPGIPDDLRCKRSDGKQWRCTAMSMADKTVCEKHYIQAKKRAANSAFRANQKKAKRRSSLGETDTYSEGKMDDFELPVTSIDHYNNGLASASKSNGRLEKRHNKSLMRYSPETPMMRSFSPRVAVDLNDDLGRDVVMFEEGYRSYRTPPSVAVMDPTRNRSHQSTSPMEYSAASTDVSAESLGEICHQCQRKDRERIISCLKCNQRAFCHNCLSARYSEISLEEVEKVCPACRGLCDCKSCLRSDNTIKVRIREIPVLDKLQYLYRLLSAVLPVIKQIHLEQCMEVELEKRLREVEIDLVRARLKADEQMCCNVCRIPVVDYYRHCPNCSYDLCLRCCQDLREESSVTISGTNQNVQDRKGAPKLKLNFSYKFPEWEANGDGSIPCPPKEYGGCGSHSLNLARIFKMNWVAKLVKNAEEIVSGCKLSDLLNPDMCDSRFCKFAEREESGDNYVYSPSLETIKTDGVAKFEQQWAEGRLVTVKMVLDDSSCSRWDPETIWRDIDELSDEKLREHDPFLKAINCLDGLEVDVRLGEFTRAYKDGKNQETGLPLLWKLKDWPSPSASEEFIFYQRPEFIRSFPFLEYIHPRLGLLNVAAKLPHYSLQNDSGPKIYVSCGTYQEISAGDSLTGIHYNMRDMVYLLVHTSEETTFERVRKTKPVPEEPDQKMSENESLLSPEQKLRDGELHDLSLGEASMEKNEPELALTVNPENLTENGDNMESSCTSSCAGGAQWDVFRRQDVPKLSGYLQRTFQKPDNIQTDFVSRPLYEGLFLNEHHKRQLRDEFGVEPWTFEQHRGEAIFIPAGCPFQITNLQSNIQVALDFLCPESVGESARLAEEIRCLPNDHEAKLQILEIGKISLYAASSAIKEVQKLVLDPKFGAELGFEDSNLTKAVSHNLDEATKRPQQNSCT

SEQ ID NO: 103 - DNA, 2643 bp, Arabidopsis thaliana
atggagggtgaagttgctactaacggagtgattctcaagcataatggtgtaaaggatatttctttagaaacttgttggccagagaagaagaaaccggttgaggcaacgagtcttagcagtggttcatcagacatagaagaagagattagtgtggaatgtcctaagcgagtggctaatcaaagacggaaacggtctaaagctgatgagattaaaacgaaatcttcaagaaagaggaaatgtgatgatgagaacaagtgtgaagagaatgagaagaagcagaggagctctgttaaaaagagagcaactacatggaaagaagaagaagttgttgttgatgatgaaaagaaatgcgaacaacaactccaactagttccttccagcaaggcaacatctcgaagcaggagcaagaaatcagtcagtgtggatacttggttggttaacaacgagattgatgttagcgctttgagttcgcgttctgagtctgaactttcggattcttatctgaaaaccgagtactttaatgactgcagaagcatgacaaggagtttaaaggcaaatttgggagagcttgcaatttgccatcaatgctctaaaggggaaagaagatatcttttcatttgcaccttttgtgaagtgaggttgtattgttttccatgcataaagaaatggtatccccatttgtccacggatgatatccttgaaaaatgtcccttttgccgaggaacttgcaactgctgcacatgtttgcactctagtggtttaatcgagacatctaagagaaagctcgataaatacgaaagattttatcatcttcgcttcttgattgtggcgatgcttcctttcctgaaaaagttatgcaaagcacaagatcaagaaatcgaaaccgaggctaaggttcaagattcaatggcttctcaagttgatatatccgagagtctatgctcaaatgaagagcgtgtcttctgtaaccactgtgcaacatcaattgttgacttgcatcgaagctgtccaaagtgttcatatgaattgtgtctgaactgttgccaagagatccgtggaggttggctttctgaccgcccggaatgtcagctacaattcgagtacagagggacccggtatatacatggcgaagctgcagaaccgagctcttcttctgtttccgaggatgaaactaaaactccatccatcaagtggaatgctgatgaaaatggaagcatacggtgtgcgccaaaagagctaggaggttgcggggactctgtgctggagcttaagcgaatcttaccagtgacttggatgtcagatttggagcaaaaggcagaaacattcttagcctcttatagtatcaaaccgccaatgtcatattgtagatgttcttctgatatgagtagtatgaagaggaaggcagcttcgagggacggatctagtgacaattacctttattctcctgattctttggatgtcctgaagcaagaagaacttctgcatttccaagagcattggtccaaaggtgaaccagtgattgttcgaaatgctcttaacaacacagctggtttaagctgggagccaatggtgatgtggcgggctttatgtgagaatgttgattcagcaattagctctaatatgtctgatgtcaaagctatcgattgtttagctaattgtgaggtgaagataaatactctatgtttctttgaaggatatagcaaaggaagaacatatgaaaacttctggcctgagatgctgaagctgaaggattggcctccttcagacaagtttgaaaaccttttacctcgtcactgcgatgagttcatttccgcattaccatttcaagaatacagcgatcctagatcaggaattctcaacattgctacaaaacttcctgaaggacttcttaaaccagatcttggtccaaaaacttatgttgcatatgggacttcagatgagctcggtagaggagattcagtcactaagcttcactgtgatatgtcagatgctgtaagtttcagaattgttaatattctgatgcatactgctgaagtaacactaagtgaggagcaaaggtctgcaattgcagatttgaaacagaaacataagcaacagaatgagaaagagcttcaggagcaaaatggtttagaggaagaagaggttgtgagtgatgagattgtggtttatgatgaaacaagtggtgcactttgggacatctttaaaagagaagatgttcctaagcttgaagagtatctaaggaagcattgcatagaattcagacatacttattgctctcgtgttacaaaggtgtatcatccaatacatgatcagtcatatttcttaaccgtggagcataaaagaaaactcaaggcagaatttgggattgagccatggacatttgtgcaaaagctaggagaagcagtgtttattccagcaggttgtcctcatcaagttcggaatctcaagtcgtgcacaaaggtagctgttgattttgtttcccctgaaaacatcgatgagtgtctccgtttgactgatgagtttcgacaactccctaagaaccataaagccagagaagacaaacttgagataaaaaagatggtgatctatgcagttgaacaagctctgaaagaagtggagacattattgctagatcgcagctaa

SEQ ID NO: 104 - protein, 880 aa, Arabidopsis thaliana
MEGEVATNGVILKHNGVKDISLETCWPEKKKPVEATSLSSGSSDIEEEISVECPKRVANQRRKRSKADEIKTKSSRKRKCDDENKCEENEKKQRSSVKKRATTWKEEEVVVDDEKKCEQQLQLVPSSKATSRSRSKKSVSVDTWLVNNEIDVSALSSRSESELSDSYLKTEYFNDCRSMTRSLKANLGELAICHQCSKGERRYLFICTFCEVRLYCFPCIKKWYPHLSTDDILEKCPFCRGTCNCCTCLHSSGLIETSKRKLDKYERFYHLRFLIVAMLPFLKKLCKAQDQEIETEAKVQDSMASQVDISESLCSNEERVFCNHCATSIVDLHRSCPKCSYELCLNCCQEIRGGWLSDRPECQLQFEYRGTRYIHGEAAEPSSSSVSEDETKTPSIKWNADENGSIRCAPKELGGCGDSVLELKRILPVTWMSDLEQKAETFLASYSIKPPMSYCRCSSDMSSMKRKAASRDGSSDNYLYSPDSLDVLKQEELLHFQEHWSKGEPVIVRNALNNTAGLSWEPMVMWRALCENVDSAISSNMSDVKAIDCLANCEVKINTLCFFEGYSKGRTYENFWPEMLKLKDWPPSDKFENLLPRHCDEFISALPFQEYSDPRSGILNIATKLPEGLLKPDLGPKTYVAYGTSDELGRGDSVTKLHCDMSDAVSFRIVNILMHTAEVTLSEEQRSAIADLKQKHKQQNEKELQEQNGLEEEEVVSDEIVVYDETSGALWDIFKREDVPKLEEYLRKHCIEFRHTYCSRVTKVYHPIHDQSYFLTVEHKRKLKAEFGIEPWTFVQKLGEAVFIPAGCPHQVRNLKSCTKVAVDFVSPENIDECLRLTDEFRQLPKNHKAREDKLEIKKMVIYAVEQALKEVETLLLDRS

SEQ ID NO: 105 - DNA, 2364 bp, Arabidopsis thaliana
atggaaaatcctccattagaatctgagatcaaagaggatatgtctttgaagaatcatcctccagacaaggataaggacaaagacactatcatggaacaacctagtagtccacgtcatcggaaggttgttgctagatggttacctgatgaagcacagaggccaattatcaatgacgctcccgtattcactccatcactagaggagtttgtagatccacttgcgtatatcgagaagatacgtccactagcagagccgtatggtatctgtcgaatcatcccaccatcgacatggaagcctccttgccggcttaaggagaagagtatatgggagcagacaaagtttcctactcggattcaaaccgtagacctgcttcagaaccgtgagccgatgaagaagaaaccgaagagtagaaagcggaaacggagaagaaactcgagaatgggttcgtctaagagacgatctggttcttctcccgctgaatcgacttcatcacccgaggctgaggagaagtttggtttcaattctggttcagacttcactcttgatgagtttgagaaatatgctctgcattttaaagactcgtactttgaaaagaaagactctggtggagatatagtaaaatggacaccgtctgtggatgatatagaaggggaatactggcggatagttgagcaaccaacagatgaagtggaggtttactatggagctgacttggagaatggggtgcttggaagcgggttttataaaagagccgagaagtttaccggtagcgatatggagcagtacacattatctggctggaacttgaataacttaccacggcttcctggctctgtactctcttttgaagattgtgacatatccggagttctagttccatggctatatgtgggaatgtgtttttcatcattttgttggcatgtggaggaccatcatttatattcacttaactatcatcactttggggagccaaaagtatggtatggtgttccaggaagcaatgcaaccgctctcgagaaggcgatgaggaaacatttacctgacttgttcgaagacagcctgatctactacatggcctgggcgtatcatgctggattcaactgcggtttcaactgcgcagaagcggttaatgtggctccggttgattggttggctcatggacagaacgctgtggaactatatagtaaagagacaaggaagacttctctgtctcacgacaagcttcttcttggagcagcttatgaagcggtgaaggctctttgggaactctcagcttctgagggaaaggaaaatacaacaaatttgagatggaagagtttctgtgggaagaacgggacacttaccaacgcgatacaagctcggttacaaatggaagaggggagaattacagctcttggtagggattcttcaagcttgaagaagatggagaaggactttgattcaaactgtgaaagggaatgtttctcatgcttttatgatttgcatctctcggcttctggctgcaagtgctctcccgaagaatacgcgtgccttaaacatgcagatgatctttgttcatgtgatgtgaaagatggatttattcttctccggtacacaatggatgagttaagctcgttggtcagagcattggaaggggaatcagatgatttaaagatatgggcttccaaggttttaggcattgaacatagtgatgaagatcagacaaagactagttcagttatcagtgaggagaagaagttaaaggaaggttcttttgatctgaacattgacttagagatggattatcaagaagacgttaaagaagaagccagcactagtggcggcgagttaaccgcctcagagaaccttggtgtatcggtcgagcctataaacctcgggttcttgatttttggaaagctttggtgcaataagtatgctatattcccaaaaggattcaggagtcgtgtcaagttctacaatgttcttgatccaacaagaatgagcaattacatctctgaggttttggatgcaggactcatgggtccattgttcagggttactctggaagaatctccagacgagagcttcttcaatgtctctgcacaacaatgctgggaaatggtgatgcggagagttaaagatacatcaacaagtcttggtcttcctattttaccacagtttgagagtatcaacgggcttcaaatgtttggtttcctctcaccctctatagttcaggccattgaagctcttgacccaaaccatcgactagttgagtactggaaccacaagaaccaaacttcatcagactcaaaagatcacttcatatcatcaaactgttccgcaagtttaaccaaaggaaaacttttcggagtagatttgatgtaa

SEQ ID NO: 106 - protein, 787 aa, Arabidopsis thaliana
MENPPLESEIKEDMSLKNHPPDKDKDKDTIMEQPSSPRHRKVVARWLPDEAQRPIINDAPVFTPSLEEFVDPLAYIEKIRPLAEPYGICRIIPPSTWKPPCRLKEKSIWEQTKFPTRIQTVDLLQNREPMKKKPKSRKRKRRRNSRMGSSKRRSGSSPAESTSSPEAEEKFGFNSGSDFTLDEFEKYALHFKDSYFEKKDSGGDIVKWTPSVDDIEGEYWRIVEQPTDEVEVYYGADLENGVLGSGFYKRAEKFTGSDMEQYTLSGWNLNNLPRLPGSVLSFEDCDISGVLVPWLYVGMCFSSFCWHVEDHHLYSLNYHHFGEPKVWYGVPGSNATALEKAMRKHLPDLFEDSLIYYMAWAYHAGFNCGFNCAEAVNVAPVDWLAHGQNAVELYSKETRKTSLSHDKLLLGAAYEAVKALWELSASEGKENTTNLRWKSFCGKNGTLTNAIQARLQMEEGRITALGRDSSSLKKMEKDFDSNCERECFSCFYDLHLSASGCKCSPEEYACLKHADDLCSCDVKDGFILLRYTMDELSSLVRALEGESDDLKIWASKVLGIEHSDEDQTKTSSVISEEKKLKEGSFDLNIDLEMDYQEDVKEEASTSGGELTASENLGVSVEPINLGFLIFGKLWCNKYAIFPKGFRSRVKFYNVLDPTRMSNYISEVLDAGLMGPLFRVTLEESPDESFFNVSAQQCWEMVMRRVKDTSTSLGLPILPQFESINGLQMFGFLSPSIVQAIEALDPNHRLVEYWNHKNQTSSDSKDHFISSNCSASLTKGKLFGVDLM

SEQ ID NO: 107 - DNA, 2652 bp, Arabidopsis thaliana
atggattctggagttaaattggagcatatgaattgtttccaattatcttatcaatattcgtggacgactaggaagaagagaactctgaaaccattcatgtcaaaaggttctagccctagtagtagtagtgatagtaggaaacggaagctttcgagagctgaagatagcgatgattcagcggttaaacggaatgcgaaacgaaggagaaagatatgcaaagtagaagaatattatgaagatgatgattgcatattaagtgattgggttcagaggaatactgcgaaaaggattgataagcgcaacgaagaagttgaagttatggttaagatagagtcaggtgatgattgcacaataggtaagtggttttctgatgttagtagtaaaaggaaagataaacgacaagtagaagttgatgaagatgaggaatgggaagaagaagttacactgtgttctaagatcaaggcaacgtcgtcgcgaagcagaacccatagtttaagtgctaacagtccagaaaatgttacagatgttattagtccttgtcgttcacggtctccagcttctaatgtatcagattccattcagaaaaatgactgcaccagtagtagaaaacagagtggcccaatttgtcatcagtgcttgaaaggggaaaggataacacttctcatttgtagtgaatgtgagaagacaatgttttgtcttcaatgtataaggaaatggtatccaaatctatctgaggatgatgttgttgagaaatgtcctttatgccgtcaaaattgtaattgtagcaaatgcttgcatttgaatggtttaattgagacatcgaagagggaactcgcgaaatctgaaagacgtcatcatctccagtatttgattacgttgatgcttccttttctgaataagttatccatattccagaagctagagattgaatttgaggcaactgttcaaggaaaactgccttctgaagttgaaataactgcggctataagctacactgatgaacgtgtatactgtgatcattgtgcaacttcaattgttgacttgcatcgaagctgtccaaagtgctcttatgaactttgtttgaagtgctgtcaagagattcgtgaaggatcgctttctgaacgccctgaaatgaagttccattatgttgatagaggacatcgatatatgcatggtttagatgctgcggaaccgagcttgtcttccacttttgaagacgaagaagctaacccatctgacgctaagtggagccttggtgaaaatggaagcatcacttgtgcaccagaaaagctaggtggttgtggtgaacggatgctagagcttaggcggatcctaccactcacgtggatgtcagatttagagcacaaagcagagactttcttatcatcatacaatataagccctagaatgttgaactgtaggtgttcttctttggagacagagctgacaaggaaatcagcttcgaggacaacatcaagtgacaactaccttttctgtcctgaatctctcggtgtcttgaaggaagaagagcttcttcattttcaagagcattgggcaaaaggcgaaccagtaatcgttaggaacgctcttgacaacacacctggtttaagctgggagccgatggttatgtggcgggctttatgcgaaaatgtgaattcaacatcaagctctgagatgtcccaagtcaaagcaattgattgcttagctaattgtgaggtggagatcaatactcgtcagttctttgaaggttatagcaaaggaagaacatatgaaaatttctggcctgagatgttgaagcttaaggactggcctccttctgataagtttgaagatcttctacctcgtcactgtgatgagttcatatccgcgttacctttccaggaatatagtgatcctagaactggaattcttaacattgcaacaaagcttcctgaaggatttatcaaaccagatttaggtccaaaaacttacatcgcctatgggattccagatgagcttggtagaggcgattccgtgactaagcttcactgcgatatgtcagacgcggtgaatattctaacgcatacggccgaagtgaccctaagtcaagaacaaatatcctcagtcaaagcactgaaacagaaacacaagttacagaataaggtcgataaacagagtactgaagactgtaacgaaaaggaagaagaagaagaagaagaattgaacatgccagagatttcgagcaatgaaaatgaagaaacgggcagtgctctttgggacatatttaggagagaagacgttcccaagttagaagagtatctaagaaagcattgcaaagaatttagacacacttattgtagtccagttacaaaggtttatcatccgatacatgaccaatcatgctatttaaccttagagcacaaaagaaaactcaaggcggaatatgggatcgagccatggacatttgtgcaaaagctaggtgaagcggtgtttattcccgcgggttgtcctcatcaagttcggaatctaaagtcgtgcacaaaagtcgcagttgactttgtgtcaccagagaacatccatgagtgtctgcgtttgaccgaagagtttcgccaacttcccaaaaaccacaaggccagagaggacaaactcgaggcaagtcttttatctctttga

SEQ ID NO: 108 - protein, 883 aa, Arabidopsis thaliana
MDSGVKLEHMNCFQLSYQYSWTTRKKRTLKPFMSKGSSPSSSSDSRKRKLSRAEDSDDSAVKRNAKRRRKICKVEEYYEDDDCILSDWVQRNTAKRIDKRNEEVEVMVKIESGDDCTIGKWFSDVSSKRKDKRQVEVDEDEEWEEEVTLCSKIKATSSRSRTHSLSANSPENVTDVISPCRSRSPASNVSDSIQKNDCTSSRKQSGPICHQCLKGERITLLICSECEKTMFCLQCIRKWYPNLSEDDVVEKCPLCRQNCNCSKCLHLNGLIETSKRELAKSERRHHLQYLITLMLPFLNKLSIFQKLEIEFEATVQGKLPSEVEITAAISYTDERVYCDHCATSIVDLHRSCPKCSYELCLKCCQEIREGSLSERPEMKFHYVDRGHRYMHGLDAAEPSLSSTFEDEEANPSDAKWSLGENGSITCAPEKLGGCGERMLELRRILPLTWMSDLEHKAETFLSSYNISPRMLNCRCSSLETELTRKSASRTTSSDNYLFCPESLGVLKEEELLHFQEHWAKGEPVIVRNALDNTPGLSWEPMVMWRALCENVNSTSSSEMSQVKAIDCLANCEVEINTRQFFEGYSKGRTYENFWPEMLKLKDWPPSDKFEDLLPRHCDEFISALPFQEYSDPRTGILNIATKLPEGFIKPDLGPKTYIAYGIPDELGRGDSVTKLHCDMSDAVNILTHTAEVTLSQEQISSVKALKQKHKLQNKVDKQSTEDCNEKEEEEEEELNMPEISSNENEETGSALWDIFRREDVPKLEEYLRKHCKEFRHTYCSPVTKVYHPIHDQSCYLTLEHKRKLKAEYGIEPWTFVQKLGEAVFIPAGCPHQVRNLKSCTKVAVDFVSPENIHECLRLTEEFRQLPKNHKAREDKLEASLLSL

SEQ ID NO: 109 - DNA, 3351 bp, Arabidopsis thaliana
atgtatggtaatgacttggatacttctgtttacgggagtggttttcctcgaataggcgaccaaagaccagaatcagttgaggcagatatatgggatgagtattgtggtagcccctggaatctcaataacatgcctaagttgaaaggatctatgcttcaggccattcgacataacattaatggtgttacagtgccttggctatatcttggaatgctcttctcttctttttgttggcattttgaggaccattgtttttactctgtcaattatctacactggggagaggcaaaatgttggtatggtattccaggcagtgctgctagtgcttttgaaaaggtcatgcgaaaaaccctacccgatctctttgatgctcagccagatttgctctttcaactagttaccatgttgagtccgactgttttacaagaaaataaagtcccggtctacacagtattacaggagccaggaaacttcgtgatcacatttccaaaatcctttcatgctggattcaattttggtctaaattgtgcagaggccgtcaactttgctactgctgattggctaccttatggtggttctggggcggagctgtatcggctgtaccggaaaccttcagtcatatctcatgaagagcttctctgcgtggtagctaagggaaactgctgcaataacgaagggtcaatacatttgaagaaagaattgctcagaatatacagcaaggaaaaaacctggagagagcagctctggaaaagtggtattttgagatcttctcctatgtttgtgcctgaatgcgctgattctgtgggcatcgaagaggatccaacatgcatcatatgccagcagtttcttcatctttctgctatcgtctgcaattgcaggccatctgtttttgcatgcttagagcactggaagcatctttgtgaatgtgaacctacgaagttgcgacttgaatatcgttatacccttgccgagttagatatgatggtacaagaagttgaaaagtttggtgggtgcaaaacacaagaaaccaaaatctcacaacggccgagttcaggcaccaaacgatctattgctttaaataaaaagcaggagggaatgcaagtgagtcaggcacggccagcagacaaatggcttcttagagcatcaaaggttcttgacgctgcgttttctagtgttgaatatgccacccttttgaaggaatcagaacagtttctttgggctggatcagaaatggaccgtgtacgagatgttacaaaaagtttgaacaaagcaaagatatgggctgaagctgttagtgactgtctttcaaaagtcgaaggtgaagtcaacgatgattcaatgaaagttcacttggaatttattgatgagttgctgagagttaatcctgttccttgctttaattctggttatctgaaactaaaggactatgctgaagaagctagaaaattgtccgagaaaatcgattcagctctctcgagtagcccaactatcacccagctggagctattgcattctgaagtctccagatcgccaatctccctaaaaaaacacgagatcttgtcaaagaaaatctcttccgcaaagatgttagctaaaagggcgaaacgctatctcacagacgctaaacctccaggaattgaaatggatgcacttttcaagctaaattcagagatgttagagcttcatgttcaacttccagaaacagaagggattctggatttggtaaagaaatcagaatcagcccgtgataaaagtaacaaagttttgactggttctttatctctcgagaatgtggaagagttgcttcatgaattcgatagtttcagcattaacgttcctgagttgaatatcctgaggcagtatcatgttgacactttgtcttggatttcacgctttaatgatgtaatggttgatgttcgtgaaggcaaggaccaacgaaagctaattagtgacctcagttcccttctacgggatggagcatccttaggcattcaagttgaaggactccctcttgttgaagttgaattgaagaaggcatcttgccgggaaaaagctcgaacggtttatactgcaagaaaatctctggatttcattgagcaactgctctcggaagctgttatactacacatcgaagaggaggagatatttgttgagatctcgggaattttgtcaacagcacggtgttgggaggaaagagcaagcactatccttgaaaatgaaactcagatgtacgagcttaaagatctcgtaaggatgtcagtcaacattgatgcggttttacctactctgcaaggcatagagaacacaatctcgtcggctgaaacttggcttcagaaatctgagccttttctatcagccacttcctctatggcatcatctccatgttctatgcttgaacttcctgtattaaaggatctagttactcaggctaaattgctcaatgttcagcttcaagagccacgaattcttgaaacattgttgcttaactgcgagaggtggcagtgtgataatcatcagctcttgcaagaaactgaagatttgttggacaatgcgaaaatagatgatggcacgcatagcaatatccttccgaagataatggatttgataaccagagtggactccgctaggagatctggtctggcccttggtctcaatttcgatgaacttcccaaacttcgaactgcaagtctaaaactaggatggtgttgtaagaccatcacgttaagctctagctcacctacctctgagttgctagaagatgttggaaagccctcgttacagcatattcagcagcacttaaaagagggacaaacacttgaaatattacctgaagagtattacttaggcaagagactcatggagttaaaagacactggactggagtgggcaaaacgagctagaaaggtggtaacagactcaggtgctcttgccttggaagatgttttcgagcttatttctgagggtgaaaacttacctgttcatgcagagcaggaacttcagtctttacgagctcggagtatgttacactgcatttgtctaaagccatacaactcaagatccatggtttcttgtagtcaatgtggcgaatggtatcacacctattgtttaaagcttcattggcggcctaaggcttatgtctgctccgcttgctgtccactggcagaaaccactccacagatcgatcccgccagagcaacagagccagagagaccgtctctgaaccaaagacggacaagaatggtcgcgactgatgcagcagttaatgacttaaagtggaaaacccgaaaacacatcaaacggacaactaaacggagtcctcaggttcatattcttccctggtttttcacttaa

SEQ ID NO: 110 - protein, 1116 aa, Arabidopsis thaliana
MYGNDLDTSVYGSGFPRIGDQRPESVEADIWDEYCGSPWNLNNMPKLKGSMLQAIRHNINGVTVPWLYLGMLFSSFCWHFEDHCFYSVNYLHWGEAKCWYGIPGSAASAFEKVMRKTLPDLFDAQPDLLFQLVTMLSPTVLQENKVPVYTVLQEPGNFVITFPKSFHAGFNFGLNCAEAVNFATADWLPYGGSGAELYRLYRKPSVISHEELLCVVAKGNCCNNEGSIHLKKELLRIYSKEKTWREQLWKSGILRSSPMFVPECADSVGIEEDPTCIICQQFLHLSAIVCNCRPSVFACLEHWKHLCECEPTKLRLEYRYTLAELDMMVQEVEKFGGCKTQETKISQRPSSGTKRSIALNKKQEGMQVSQARPADKWLLRASKVLDAAFSSVEYATLLKESEQFLWAGSEMDRVRDVTKSLNKAKIWAEAVSDCLSKVEGEVNDDSMKVHLEFIDELLRVNPVPCFNSGYLKLKDYAEEARKLSEKIDSALSSSPTITQLELLHSEVSRSPISLKKHEILSKKISSAKMLAKRAKRYLTDAKPPGIEMDALFKLNSEMLELHVQLPETEGILDLVKKSESARDKSNKVLTGSLSLENVEELLHEFDSFSINVPELNILRQYHVDTLSWISRFNDVMVDVREGKDQRKLISDLSSLLRDGASLGIQVEGLPLVEVELKKASCREKARTVYTARKSLDFIEQLLSEAVILHIEEEEIFVEISGILSTARCWEERASTILENETQMYELKDLVRMSVNIDAVLPTLQGIENTISSAETWLQKSEPFLSATSSMASSPCSMLELPVLKDLVTQAKLLNVQLQEPRILETLLLNCERWQCDNHQLLQETEDLLDNAKIDDGTHSNILPKIMDLITRVDSARRSGLALGLNFDELPKLRTASLKLGWCCKTITLSSSSPTSELLEDVGKPSLQHIQQHLKEGQTLEILPEEYYLGKRLMELKDTGLEWAKRARKVVTDSGALALEDVFELISEGENLPVHAEQELQSLRARSMLHCICLKPYNSRSMVSCSQCGEWYHTYCLKLHWRPKAYVCSACCPLAETTPQIDPARATEPERPSLNQRRTRMVATDAAVNDLKWKTRKHIKRTTKRSPQVHILPWFFT

SEQ ID NO: 111 - DNA, 2751 bp, Arabidopsis thaliana
atgacgacgttaggacaaagagatcgccgaccagatgctctcggtagtctcagtgttctaccagatgagaccatctgtgttcttctcgaataccttgctccccgagatattgctcacctcgcttgtgtcagcagtgtgatgtatattctatgtaatgaagaaccattgtggatgagtttgtgtctcagaagagcaaaaggtcctcttgaatacaaaggttcttggaaaaaaacaacattgcatctagaaggagttactcaagaaaatgacgcatacagaaaatgttttcattttgatggattcatgtcgttgtacttgtataaacgattctataggtgtaatacatctcttgacgggttctcttttgataatgggaatgtggaacgtaggagaaatatctccttggatgagttttctaaggaatacgacgccaagaaacctgttttgctttctggccttgctgattcttggccagccagtaatacgtggactatcgaccaactctcagagaaatatggtgaagtcccgtttagaatatctcagaggagccccaacaaaatttccatgaagttcaaggattacatcgcatatatgaaaactcagcgggatgaagatcctctatacgttttcgatgacaagtttggagaagctgctccagaattattgaaagactatagtgtgccccatttgtttcaagaagattggtttgagatcttagacaaggaaagtcgtcctccatacagatggcttatagttggtccggagaggtctggtgcatcttggcatgttgacccagctcttaccagcgcctggaacaccctgctttgcggtcggaaaaggtgggcattgtatccccctggaaaagtgcctctaggtgttacagtccatgtcaatgaagatgagggtgatgtcagcattgatacaccctcatctctgcagtggtggctagactattatccccttcttgcggacgaagacaaaccgattgagtgcacactactacctggcgaaacgatttatgttccaagtggttggtggcactgtatccttaatcttgaaccaacagtggctgttacccagaattttgtgaacaaagaaaactttgggttcgtgtgcttggatatggcgcctggttaccatcacaaaggagtttgccgtgctgggcttcttgctcttgatgatgaaaattctgaagatttggaagaagaaacacacgatgaagaagataatactttgagctattcagaccttaccaggaaagagaagaggacacggatgaatggaggtggagagactgaaaaccgcgaagaggatgtgaatggagtatcgaagagatataatatgtggaagaatggattttcatatgatatcgatttcctcgcttcatttcttgataaagaaagagatcattacaatttcccatggtcaatggggaactctgtaggccaacgagaaatgagagcctggctatccaagctttgggttctgaagcctgagatgagagaactaatatggaagggagcatgcattgctttaaatgctgagaaatggttgcgatgcctagaggaagtatgtactttccacaacttgccgttggttaccgaagatgaaaagcttccagttggaactggcagcaaccctcttgagttttatgacattcttggccgggctgattctcctttgaaaacacatattcctgaagttctagcaagcgggattcttttcttcgaaaaaggatcttacaaagttgtcccttgggatggcaagagaatcccagatattatctctagctccagtttcgattttgatgcatccatgttaaacagcgaattcccatttggtatttggaataaaacgctacgtgaacataaaaaccaggggaagccagcacccgattcttttggttcattgagttcacatgtttggccatatattataaccaaaagatgcaaagggaagatttttgcccaactaagagatgatctaacctggaacgacgctcagaacctggctttctttctcggacaacaactacgcaaccttcatctacttccatatccaccggtcacacgtccggagttgttgaatgtgaatgctgttcatgaggagttgaacattccagcagaatggaaagtttttgtcgatgctctgtgccaaaagaagaaggacgtcactagtcgtctggaaaactggggaaatccgatacctcgggctctgatgaccaagatagacgaatacattcccgatgacttttttgtagatttactccacgtcttcaaggagacaaatggtggagatgaaatcaagccctgcacctggatacactcagacgtaatggatgacaacattcacatggaaccatacgcagatgattcagttgatggtcaacacaactcatggcgtcccagtcatattcttgacttcagcgatttaaccataggagatcccatctgcgacttgataccaatatacttggacgtctttagaggagacgctgatcttcttaagaagcttctagaaaattatggacttccattaatcagaagtagatcttcagagaacggaacaacaaaaacagcagacagtacgaggaagaaagtattgtctccatcctaccgtacaatgtgttactgtatattacatgaagaaaatgtgttgggttcaatattcagtatttgggacgaacttcggactgctgaatcatgggaacaagttgagcaaactgtttggagtctacttaacacctactaa

SEQ ID NO: 112 - protein, 916 aa, Arabidopsis thaliana
MTTLGQRDRRPDALGSLSVLPDETICVLLEYLAPRDIAHLACVSSVMYILCNEEPLWMSLCLRRAKGPLEYKGSWKKTTLHLEGVTQENDAYRKCFHFDGFMSLYLYKRFYRCNTSLDGFSFDNGNVERRRNISLDEFSKEYDAKKPVLLSGLADSWPASNTWTIDQLSEKYGEVPFRISQRSPNKISMKFKDYIAYMKTQRDEDPLYVFDDKFGEAAPELLKDYSVPHLFQEDWFEILDKESRPPYRWLIVGPERSGASWHVDPALTSAWNTLLCGRKRWALYPPGKVPLGVTVHVNEDEGDVSIDTPSSLQWWLDYYPLLADEDKPIECTLLPGETIYVPSGWWHCILNLEPTVAVTQNFVNKENFGFVCLDMAPGYHHKGVCRAGLLALDDENSEDLEEETHDEEDNTLSYSDLTRKEKRTRMNGGGETENREEDVNGVSKRYNMWKNGFSYDIDFLASFLDKERDHYNFPWSMGNSVGQREMRAWLSKLWVLKPEMRELIWKGACIALNAEKWLRCLEEVCTFHNLPLVTEDEKLPVGTGSNPLEFYDILGRADSPLKTHIPEVLASGILFFEKGSYKVVPWDGKRIPDIISSSSFDFDASMLNSEFPFGIWNKTLREHKNQGKPAPDSFGSLSSHVWPYIITKRCKGKIFAQLRDDLTWNDAQNLAFFLGQQLRNLHLLPYPPVTRPELLNVNAVHEELNIPAEWKVFVDALCQKKKDVTSRLENWGNPIPRALMTKIDEYIPDDFFVDLLHVFKETNGGDEIKPCTWIHSDVMDDNIHMEPYADDSVDGQHNSWRPSHILDFSDLTIGDPICDLIPIYLDVFRGDADLLKKLLENYGLPLIRSRSSENGTTKTADSTRKKVLSPSYRTMCYCILHEENVLGSIFSIWDELRTAESWEQVEQTVWSLLNTY

SEQ ID NO: 113 - DNA, 2421 bp, Arabidopsis thaliana
atggagcctttcagtgctgctcagaacaaagaggacaaggacactagcgtagaacctcctcgtaggcgttgtcatcgaaagaacaagggcactaatgtagaacctcctagtagtccgtatcatccgaaggttcttgctagatgggatccggctaatgaaaagaggccagacattggtgaagctccagtattccaccctacatcagaggagtttgaagatacgcttgcttacatagaaaaaatacgtcccttagctgaatcatttggtatttgtcgaatcgtgccaccgtcgaattggtctcctccttgccggcttaaaggggatagtatatggaagaataaaaatttcccaacccgtgttcagtttgttgacctgcttcagaacagaggacccgtgaagaagaagacacctaaaggaaggaaacggaaacgaggaaaatactcaagaaccgtcgcccccaagaaacgaaatggctctgtttctaaatcagtttctacccccaaggcgaccgaagaagagaattttggtttcgaatctggtccagaatttactcttgagaagtttgagaaatacgctcaagatttcaaagactcctactttgaaagaaaagacaatgttggagatccatctgttgaggagatcgaaggagagtactggagaatcattgagaaagaaacaaatgaagttaaggtattgtatgggacggatttggagaatcccatacttggaagcggtttctccaaaggggtaaaaattccaaccagaagaaatgatatggataaatacatatcttctggttggaatttgaacaacctcgcccgtctgcagggatctctactatcctttgaggattgtgagatctcaggggttcaggtgccatggctctatgtgggcatgtgcttttcaacgttttgttggcatgttgaggacaatcatctatattcactgaactatcatcactttggcgagccaaaagtatggtacggagttccgggaagccatgcaactgggctagagaaggcaatgagaaaacatctaccagatttgttcgatgaacaacctgatctacttcatgaactggttactcagttttctccaacgattttgaaaaatgagggagtcccggtttatcgagctgttcagaatgcaggggagtatgttctaacattccctagagcatatcattcgggtttcaactgcggattcaactgtgcagaagcggtgaatgtggctccggttgattggctggctcatggacagaatgctgtggaaatatatagccaagagactcggaaaacgtctctatctcatgacaaaattctccttggagcagcttttgaagctgttaagtccctctcagcacatggggaagataatacaaaaaggttcagctggaagagattctgtgggaaggacggtatcataactaaggccatcgaggcacggttacggatggaagaaaaaagaattgaggctcttggaaatggtttcagcttggtaaagatggataaagactttgattcaaactgtgaaagggaatgcatctcttgctttagtgacttgcatctctctgctactggctgcaagaattgctcatctctcgaagaatatggttgcacgaaacacgatatttgttcatgtgaagggaaagaccgtttcatttttcttcgttacaccatagatgagttaagctcattggtaagagcattggaaggtgaatcagatgatctaaaagcttggctttccaaagtcatggaaggttgttcagagactcagaagggagaatctagtgggattatcgttaaggaaaagcaggtacaagaagaatgttttgatctgaatggtgagtgtaataaatcttctgagatatgtgaggatgcatccatcatggacttagctgcttatcatgttgaacctataaatcttgggttcttggtcgtgggaaagctttggtgtaacaagcatgctatatttccaaaagggtttaagagtcgtgttaagttctataacgtgcaagatccaatgagaataagctattacgtctctgagattgtagatgcaggacttctgggtccactcttcaaggttactttggaagaatctcaagacgagagcttctcttatgcctcacctcagaagtgctgggaaatggtgttgcttagagttaaggaagagatcatgagacgcagcaaccaaaaacaagatgtccatatgttggaaagcatcgatgggttaaaaatgtttggctttcgctctccgtttattgttcaggccactgaggctcttgacccgaaccatggccaagtggagtattggaaccataagaatgagaaggattcgctggaaatgaaagattgcttcatgtcaaattcttcccagagcttaagcaaagcaagactttttggggttgatttgaattga

SEQ ID NO: 114 - protein, 806 aa, Arabidopsis thaliana [sequence omitted]

SEQ ID NO: 115 - DNA, 2127 bp, Arabidopsis thaliana
atgggcattgaaggtgtatcaacgtatttgaaatctggaaatatggacacaatttctgctccgccaggttttgtatctcaaacatcgtttgtgctgaggaatgtaccccgagacaaagaaagtcccaggtccgtgtcgagacaagagcagacaactggattcggcacagatgataaagatagttgcaatatgtttcttaaaagccgaccgtggatagtgcatggtcacacaattcccagctcagaggccttaaggccgaaaaaaactgaggtacggagaagacggcccctcaaagtgtctgagaccaaagtccttgaggaagctcctgtgttcaacccaaccgaagaggaattcagggacacactctcatatatatcaagcttgcgtgacagagctgagccgtatggaatctgttgtgttgttcctccaccttcatggaaacctccatgtcttctcaaggagaaacaaatatgggaggcttctacatttttccctcaagttcagctctttggaattcagaccgagaaccgaaagattaaaaaggaggttgatgcagatagtaatgatgctgcatctgaaggggttcagttatgtagagtagaacgtggtcctgggtatactttgaagtcctttaaaaactttgcagatacatacaagaagagtcattttggcatgaaggatgaggttttgggttcagagaactcatctccatcacttaaaccaaatgagctaattgtggcagacattgaaaaagagtacagacaaattgttgagagtccacttattgaaattggggtgctttatggcaatgatttagacactgcaacgtttggaagtggatttcccttatctgcaccatctgaatctagcaaatattcatcaggttggaatctgaacagtacggctaagcttcctggttctcttctatcattagaagactgcgaatcagtttgtgttcctcgtctaagtgtaggaatgtgcttgtcttcccagttctggaaatctgagaaggagagactctactctctctgctatttgcatgtgggcgctcctagagtgtggtattccgtagcaggatgtcatcgatcaaagtttaaggctgccatgaaaagcttcatccttgagatgtcaggagaacagccaaagaagagtcataatcctgtgatgatgatgtctccatatcaattgagcgtggagggtataccagtgacccgctgtgtccagcaccctggccagtatgttattatatttccagggtcgtattactctgcctttgactgtggcttcaactgtttggagaaagcaaactttgctccccttgattggttgccccatggggatattgctgttcaggtgaatcaagagatgagtaaaacgtcgctgatatcgtatgataagctattatttagtgctgcaagggaagctgtaaaatgtcttaaggaatatgggttgtcgaagaaaaacacagcatgttacacgagatggaatgattcttgtgggacggatgggttgttctccaacataatcaagtcacggatcaaactggagaaaaatagacgtgaatttcttatcagttcactagaatcgcaaaggatggacaagagttatgatgctgtgaacaaaagggaatgctgtgtatgtcttggggatttgtatctttccgcggttaactgttcatgctctgctaatcgttactcgtgtctgaaccacatgaggaagctctgtgcatgtccgtgtgacagaaagagttttctctataggtacactatggatgagttgaatcttctcgttgaagccctggaaggtaaaaagctcagctctatgttcagatgggcaggcatagatcaaaaattctgtgcttctccagccaccacaagttcaaaacccgaagaagacaaaggcaaggaaacagatgaggttacaccctgtaatatcacgaggaaagatgtcgcagctggaactaaggaccagacaagagtgaaggcgagatctttggctgatatactgaatgttaaagatggaaacaatgatgcaaaggagactttagaatcttgttctaagaaatcaaacaggccatgcgataacgattcctctgaggccaacgcgccaaagaaacagaagcagtga

SEQ ID NO: 116 - protein, 708 aa, Arabidopsis thaliana
MGIEGVSTYLKSGNMDTISAPPGFVSQTSFVLRNVPRDKESPRSVSRQEQTTGFGTDDKDSCNMFLKSRPWIVHGHTIPSSEALRPKKTEVRRRRPLKVSETKVLEEAPVFNPTEEEFRDTLSYISSLRDRAEPYGICCVVPPPSWKPPCLLKEKQIWEASTFFPQVQLFGIQTENRKIKKEVDADSNDAASEGVQLCRVERGPGYTLKSFKNFADTYKKSHFGMKDEVLGSENSSPSLKPNELIVADIEKEYRQIVESPLIEIGVLYGNDLDTATFGSGFPLSAPSESSKYSSGWNLNSTAKLPGSLLSLEDCESVCVPRLSVGMCLSSQFWKSEKERLYSLCYLHVGAPRVWYSVAGCHRSKFKAAMKSFILEMSGEQPKKSHNPVMMMSPYQLSVEGIPVTRCVQHPGQYVIIFPGSYYSAFDCGFNCLEKANFAPLDWLPHGDIAVQVNQEMSKTSLISYDKLLFSAAREAVKCLKEYGLSKKNTACYTRWNDSCGTDGLFSNIIKSRIKLEKNRREFLISSLESQRMDKSYDAVNKRECCVCLGDLYLSAVNCSCSANRYSCLNHMRKLCACPCDRKSFLYRYTMDELNLLVEALEGKKLSSMFRWAGIDQKFCASPATTSSKPEEDKGKETDEVTPCNITRKDVAAGTKDQTRVKARSLADILNVKDGNNDAKETLESCSKKSNRPCDNDSSEANAPKKQKQ

SEQ ID NO: 117 - DNA, 3084 bp, Arabidopsis thaliana
atggattctgtggaggaagaaggtgttgttagggttgaagaagagaacggacgcggtggtctccgtaggcatcggagggtttctacgaagctggcgaattacgtagatcctccgactgacgacgaagaagatggaggacccaagcgaaagggcaaaaggggtggaaatagggctccgaaaaagacaccgaagaaagacgaggagatgcaaaagaacgaaattgatgaagcaaaccgagtcactggtctggtgaaggaaaaaagagccgcgactaagattctgaatcgcaaagactccattattgaagtaggagaagcttctggaagcatgcccaaggaagtaaagggaattaggattgggaaaaggaagggagaaatcgatggtgagattccaactaagccgggcaagaagccaaagactacagtagacccgagaatcattggttacagaccggacaatatgtgccatcaatgtcaaaagagcgataggattgttgaacggtgtcagacctgcaatagtaagcgttattgtcatccatgcttggacacttggtacccccttatagcaaaagaagatgttgccaagaaatgcatgttctgctctagtacttgcaattgcagagcatgcttgcgtctagatactaaattgaaagggataaattcgaacctcatagtcagcgaggaagaaaaggtccaagcctctaagtttattctgcagagccttctcccacatctgaaaggaataaatgatgaacaagttgctgagaaggaagttgaggccaaaatatacggactgaagtttgaagaggtgaggccccaagacgctaaagctttccctgatgaaagactatactgtgatatctgcaagacttctatctatgatctccataggaattgcaagtcctgtagttttgatatctgccttagctgttgccttgagatccgcaatggaaaggctctggcatgtaaggaggatgtgtcttggaattatattaaccgaggtttagagtatgaacatggacaagaaggaaaagtgattgaaaagccggcgaataagctagatgataagttgaaagataagctggatggtaagccggatgataagccgaagggtaagccaaagggtaggccaaagggtaagccggatgataagccgaagggtaaactgaagggtaagcaggatgataaaccggatgataagccagatgagaagccggttaatacagaccatatgaagtacccttctctgtggaaagcaaatgaagctgggatcattacttgttgttgtggtgctggggagttagtgctgaaacgactacttccggatggttggatatctgagttggtcaacagagttgaaaaaactgctgaagctggcgagcttttgaatttacctgaaacggttttggagcgatgcccttgttctaactctgacagacatattgacatagacagctgtaatttgttaaaagctgcttgtcgagaaggttcagaagacaattatctttactctccaagtgtatgggatgttcaacaagatgatttgaagcattttcagcaccattgggtaaaaggcgagcctgtgattgtgagaaatgtgcttgaagctacatctggtttaagctgggaaccaatggtaatgcatcgtgcctgccgccagataagccatgtccagcatggatcacttaaggatgttgttgctgttgattgtttggacttctgtgaggtaaaagttaatcttcatgaattttttactggatacacggatggccgatatgatcgaatgggttggccactagttctgaaactgaaagattggcctccagctaaagtcttcaaagataacttgccacgtcatgctgaggagttcttatgtagtttgcctttgaagcattacactcatccggttaatggacctttgaatctcgctgtcaagcttccccaaaattgcttgaagccagacatgggaccaaagacgtacgttgcttctggatttgctcaagaattaggccgtggagattctgttactaagctccactgcgacatgtctgatgcggtgaatattttgacgcacatatctgaagtgcccaatatgcaacctggaattggaaatctgaaaaagaagcatgccgaacaagatctcaaggagctgtatagctcagtagctaacaaggaggaaatgatggagattcttgaaaattccagacaacaagtccaaaatgttgaaactgatgatggagctctttgggacattttccgtagagaagatattcctaaattagaaagttacattgagaaacatcacaaggagttcagacatctctactgctgtcctgtgtctcaggttgttcatcctatacatgaccagaacttctatctgacgcggtatcatataatgaagctgaaagaagaatatggcattgaaccttggaccttcaatcagaagcttggtgatgctgttttgatacctgtaggttgccctcatcaagttagaaatttgaagtcctgcaataaggtagcgcttgacttcgtctcacctgaaaatgtcagcgagtgtttacgcttgacaaaacagtatcgtctacttccaccaaatcattttgcaaaagaagacaagttaggggttaagaagatgatagtccatgcagttgataaagctctcagagacttaagtggagagaagtctccagaacctgaagagaagaaacaaaatatgagagggccgaagaagggggcagccaaggcagttgccaaggctctcaaagacttatctccaagtgaaaagaagtcttcggaagcagctgaagaggagatatcaaatgggatagtcaatgcaatcgataagggtctcaaagacttacctccaagtgaagagaagtcttccgaagccaaagtggagatatcaaatgggatagtcagtgcaatggataaggatctcgaacacatatcttcaagcgaaaagaagtctacggaagaggaaggggtgaaaagaccaaatattgtgaggacatatgagcggagaaaaaagctgggaagtgaagtaaccaacgcatacattgacagattagaaatggagaagatgtag

SEQ ID NO: 118 - protein, 1027 aa, Arabidopsis thaliana
MDSVEEEGVVRVEEENGRGGLRRHRRVSTKLANYVDPPTDDEEDGGPKRKGKRGGNRAPKKTPKKDEEMQKNEIDEANRVTGLVKEKRAATKILNRKDSIIEVGEASGSMPKEVKGIRIGKRKGEIDGEIPTKPGKKPKTTVDPRIIGYRPDNMCHQCQKSDRIVERCQTCNSKRYCHPCLDTWYPLIAKEDVAKKCMFCSSTCNCRACLRLDTKLKGINSNLIVSEEEKVQASKFILQSLLPHLKGINDEQVAEKEVEAKIYGLKFEEVRPQDAKAFPDERLYCDICKTSIYDLHRNCKSCSFDICLSCCLEIRNGKALACKEDVSWNYINRGLEYEHGQEGKVIEKPANKLDDKLKDKLDGKPDDKPKGKPKGRPKGKPDDKPKGKLKGKQDDKPDDKPDEKPVNTDHMKYPSLWKANEAGIITCCCGAGELVLKRLLPDGWISELVNRVEKTAEAGELLNLPETVLERCPCSNSDRHIDIDSCNLLKAACREGSEDNYLYSPSVWDVQQDDLKHFQHHWVKGEPVIVRNVLEATSGLSWEPMVMHRACRQISHVQHGSLKDVVAVDCLDFCEVKVNLHEFFTGYTDGRYDRMGWPLVLKLKDWPPAKVFKDNLPRHAEEFLCSLPLKHYTHPVNGPLNLAVKLPQNCLKPDMGPKTYVASGFAQELGRGDSVTKLHCDMSDAVNILTHISEVPNMQPGIGNLKKKHAEQDLKELYSSVANKEEMMEILENSRQQVQNVETDDGALWDIFRREDIPKLESYIEKHHKEFRHLYCCPVSQVVHPIHDQNFYLTRYHIMKLKEEYGIEPWTFNQKLGDAVLIPVGCPHQVRNLKSCNKVALDFVSPENVSECLRLTKQYRLLPPNHFAKEDKLGVKKMIVHAVDKALRDLSGEKSPEPEEKKQNMRGPKKGAAKAVAKALKDLSPSEKKSSEAAEEEISNGIVNAIDKGLKDLPPSEEKSSEAKVEISNGIVSAMDKDLEHISSSEKKSTEEEGVKRPNIVRTYERRKKLGSEVTNAYIDRLEMEKM

SEQ ID NO: 119 - DNA, 4083 bp, Arabidopsis thaliana
atggcggtttcagagcagagtcaagatgtgtttccatggcttaaatcgttaccggttgctccagagttcagacctactctagcagagtttcaagatccgatcgcttacattttgaagattgaagaagaagcttctagatatggaatctgtaaaattctgcctccactgcctcctccttccaaaaaaacctcgatttctaatctcaaccgttctctggcggcaagagcggcggcgagggttcgtgacggcggctttggcgcgtgtgattatgacggtggtcccacattcgccacgcgccagcagcagatcgggttttgccctaggaaacagcgtccagtgcagagacctgtgtggcagagtggagaggagtactcttttggtgagttcgagtttaaagctaagaactttgagaagaattatctcaagaaatgtggtaaaaagagtcaactctctgcccttgaaattgaaacactttactggagagccactgtggataaacccttctctgttgagtatgccaatgacatgcctggctcggcttttatccctctgagtctggctgctgcgaggaggagagagtctggtggtgaaggaggaacagttggtgagaccgcttggaacatgagggcaatgtctagagccgaaggatcattgcttaagttcatgaaggaagagatccctggagttacatcaccaatggtgtatgttgctatgatgtttagttggtttgcttggcatgtggaggaccatgaccttcatagtctcaattacttgcatatgggtgctggtaagacttggtacggtgtgccaaaggatgctgctctggcttttgaggaggttgttagggttcatggttacggtgaagagctcaatcctcttgtgacattttctactcttggtgagaagacaactgtgatgtctcctgaagtatttgttaaagccggaataccgtgttgcaggttagtgcaaaatcctggagagtttgtcgtcacctttccgggagcttatcattcgggatttagtcatggatttaattttggagaagcatctaacattgccactcccgaatggttgagaatggctaaagatgctgctatccggcgagctgctataaattaccctccaatggtttctcatctccagctactttatgactttgtattggctctaggttctagagtgccaacaagcatcaatcccaaaccacggagttctagattaaaagataaggcaagaagcgaaggagaaagattgaccaaaaagctatttgtgcaaaacattatccacaacaacgaattgctttcttctctcggaaaaggatccccagtggcccttctcccacagagttcctcagatatatcagtttgttctgacctgcgaattggatcccatttgataaccaaccaggaaaacccaatccagttaaagtgtgaggacttaagttctgatagtgttgtggttgatctcagtaacggtttaaaggatacagtttcagtgaaagaaaaatttacatctttatgtgaaaggagcagaaatcacctagcaagcacggagaaggacactcaagaaactctgtctgatgctgaaaggaggaagaatgatgcagctgttgcgctttcggatcaaaggcttttctcttgtgttacatgtggagtcttaagctttgattgtgtagctatcgttcaacctaaagaagcagctgctagatatctcatgtctgcagattgtagcttcttcaatgattggacagctgcttctggatctgcaaatcttggtcaggctgcaagatcacttcatcctcaaagcaaagagaagcatgatgtaaattacttctacaatgttcctgttcaaactatggatcattcagtgaagactggcgatcaaaaaacttcaacaacttccccgacaatagcgcataaagataatgatgttcttgggatgttagcttcagcatatggagactcttctgattccgaggaagaagatcaaaaaggcttagttacccctagttccaaaggggaaacaaaaacgtatgatcaagaaggttcagatggccatgaggaggctagagatggtagaacttctgattttaactgccagagactaaccagcgaacagaatgggttaagcaaaggcggaaaatcatcacttctggaaatagctttaccatttattccaagatctgatgacgattcatgtcggttgcacgtgttttgtcttgagcatgctgcggaagtggaacagcaacttcgtccttttggggggattaacttaatgttactgtgccatccagagtaccccaggatagaggctgaagcaaagatagttgccgaagagctcgtcatcaatcacgaatggaatgatactgaattcaggaatgtgacccgagaggatgaggaaacgattcaggcagcgttggataatgttgaagctaagggtgggaacagtgattggaccgtaaaattgggtgttaacctttcttacagcgctattctcagtcgctctcctctgtacagtaagcagatgccgtataactccatcatatacaaggcgttcggtcgcagctctccagtagcgagctcaccctcgaaacccaaagtctctggtaaaagatcgtccagacagaggaaatatgttgttggaaaatggtgtggtaaggtttggatgtcacatcaggtgcatccctttttgctggagcaggacttagagggggaagaatctgaaagaagttgtcatcttcgagttgctatggatgaggatgccactggaaagagatcgtttcctaataatgtttccagggattcgacaacaatgtttggaagaaagtattgtaggaagagaaagataagagcaaaggcggtgccacgcaagaagcttacttcttttaagagggaagatggagtttctgatgacacatcagaagatcattcttataagcagcaatggagggcttccgggaatgaggaagagtcttattttgagacagggaacacagcttctggtgattcatcaaatcaaatgtctgatccgcacaagggaattatcagacataaaggttataaagaatttgagtcagatgatgaggtttcagaccgttcacttggggaagagtatactgtacgggcatgtgcagcttcagagagctcaatggagaatggctctcagcattcaatgtatgaccatgatgatgatgatgatgatatcgacaggcagcctagggggattccaaggagccaacagacaagagtttttaggaatccagtttcatatgagtcagaagataatggcgtttatcagcaaagcggaagaatatccataagtaataggcaagctaatcgaatggttggtgaatatgattcagcagagaattctttggaggaacgaggcttttgcagtacagggaaaaggcaaaccaggtcaacagccaaacgaatagcaaaaaccaagacagttcagagttcgagagacacaaaaggtcgctttttgcaagaatttgcatctggaaagaagaatgaagaattggattcatacatggagggacctagcacacggcttagggtgagacatcagaagccgtcgagagggtctttagaaacaaaaccaaagaagattggtaagaagagaagtggtaatgcttccttctccagagttgcaactgaaaaagatgtggaggaaaaagaagaagaagaagaagaagaagagaatgaggaagaggaatgtgcagcataccaatgtaacatggagggttgcacgatgagtttcagttcggaaaaacagttgatgttacacaaaagaaacatatgcccaattaaaggctgtggtaaaaacttcttctcacacaagtatttggttcaacaccagcgtgttcactcagacgaccgtcctctgaaatgtccatggaagggatgtaagatgacgttcaagtgggcttggtctagaaccgagcacataagggttcacacaggcgctaggccttatgtttgcgctgaaccggattgtggtcaaacattcaggtttgtctctgacttcagccggcataaaaggaagaccggtcattcggttaagaagaccaacaaaaggtga

SEQ ID NO: 120 - protein, 1360 aa, Arabidopsis thaliana
MAVSEQSQDVFPWLKSLPVAPEFRPTLAEFQDPIAYILKIEEEASRYGICKILPPLPPPSKKTSISNLNRSLAARAAARVRDGGFGACDYDGGPTFATRQQQIGFCPRKQRPVQRPVWQSGEEYSFGEFEFKAKNFEKNYLKKCGKKSQLSALEIETLYWRATVDKPFSVEYANDMPGSAFIPLSLAAARRRESGGEGGTVGETAWNMRAMSRAEGSLLKFMKEEIPGVTSPMVYVAMMFSWFAWHVEDHDLHSLNYLHMGAGKTWYGVPKDAALAFEEVVRVHGYGEELNPLVTFSTLGEKTTVMSPEVFVKAGIPCCRLVQNPGEFVVTFPGAYHSGFSHGFNFGEASNIATPEWLRMAKDAAIRRAAINYPPMVSHLQLLYDFVLALGSRVPTSINPKPRSSRLKDKARSEGERLTKKLFVQNIIHNNELLSSLGKGSPVALLPQSSSDISVCSDLRIGSHLITNQENPIQLKCEDLSSDSVVVDLSNGLKDTVSVKEKFTSLCERSRNHLASTEKDTQETLSDAERRKNDAAVALSDQRLFSCVTCGVLSFDCVAIVQPKEAAARYLMSADCSFFNDWTAASGSANLGQAARSLHPQSKEKHDVNYFYNVPVQTMDHSVKTGDQKTSTTSPTIAHKDNDVLGMLASAYGDSSDSEEEDQKGLVTPSSKGETKTYDQEGSDGHEEARDGRTSDFNCQRLTSEQNGLSKGGKSSLLEIALPFIPRSDDDSCRLHVFCLEHAAEVEQQLRPFGGINLMLLCHPEYPRIEAEAKIVAEELVINHEWNDTEFRNVTREDEETIQAALDNVEAKGGNSDWTVKLGVNLSYSAILSRSPLYSKQMPYNSIIYKAFGRSSPVASSPSKPKVSGKRSSRQRKYVVGKWCGKVWMSHQVHPFLLEQDLEGEESERSCHLRVAMDEDATGKRSFPNNVSRDSTTMFGRKYCRKRKIRAKAVPRKKLTSFKREDGVSDDTSEDHSYKQQWRASGNEEESYFETGNTASGDSSNQMSDPHKGIIRHKGYKEFESDDEVSDRSLGEEYTVRACAASESSMENGSQHSMYDHDDDDDDIDRQPRGIPRSQQTRVFRNPVSYESEDNGVYQQSGRISISNRQANRMVGEYDSAENSLEERGFCSTGKRQTRSTAKRIAKTKTVQSSRDTKGRFLQEFASGKKNEELDSYMEGPSTRLRVRHQKPSRGSLETKPKKIGKKRSGNASFSRVATEKDVEEKEEEEEEEENEEEECAAYQCNMEGCTMSFSSEKQLMLHKRNICPIKGCGKNFFSHKYLVQHQRVHSDDRPLKCPWKGCKMTFKWAWSRTEHIRVHTGARPYVCAEPDCGQTFRFVSDFSRHKRKTGHSVKKTNKR

SEQ ID NO: 121 - DNA, 2523 bp, Arabidopsis thaliana
atggagaaaatgagagggaagcgaatcagaccaagagattccggcgagttagtcgaagatgggagatctgaaagcgagcgtaagacgaggaagaaagagaatgatgttgtgagcaaaggaagaatcggaagaggaagaggaagaggagaggtttcgaagcgatctattgaaatagacatttctaatcccgagaaggatattaagcctgacggaagcagaaagtgtttgggttcgacgtgtcatcattgtaagatcttgacgagtgagagtgatcttatcttctgttcaaagtgtaacaagaagtgttattgctttgactgcatcaagagatcgtattcagaaagaacacatgaggaagttagagctgcttgtccattctgtatgatgacttgcatttgcagagcttgtttgcggttgcctttggttatcaagcctccaagtgaaaaagatacagatgtcaagcttaagcagctgcagtatctgttagtcaaagttctcccagttcttaaggatatttatacggagcagaaccgtgaactagagattgaatcaacaattagaggacaccctgtgacagaagctaatatcaagaggtgcaaacttgacccaagcgaacgcatatactgtgatctctgccgcacatccattgccaattttcacagaagctgtccgaacaaaaattgttcagtcgatatatgtctttcttgctgcaaggaactaagtgagggcttccatcaagagagagatgggaagaaaaatgcagaagggaaaggatatgaatgtcgaatcccagcaggtcaaggaaaagactcggacgcatatgttccactgcatttctcgacttggaagcttaactcagacagtagcattccatgccctccaaaagagtgtggtggttgtggtacttcaacactggagttgagacgcttatggaaaagagattgggttgaaaaattaataacgaatgccgagaaatgtactctgaattttaggccaacagatgtggatattgttcatgaatgttcctcatgctctaccaattctgattccattagaaggcaggcagcttttaggaagaatgctcatgataatttcttatactccccaaatgctgttgatctggctgaagacgatattgctcattttcagtttcattggatgaaggcagaacctgtgatagtcagaaatgttctcgagaagacatctggactaagttgggaaccaatggttatgtggagggcttgtagggaaatggatccaaagcgtaaaggtacagaagaagagacaacaaaagtgaaagctttggattgcttggactggtgtgaggttgaaataaatctgcatcagttttttgagggctacttagaaggccgcatgcataaaaacggttggccagaaatgttgaaattgaaggactggcctccctcagatttatttgaaaagcgccttccaaggcataatgctgagtttattgccgcattgcctttctttgattacactgacccaaagtctggtatcctaaatctcgcaacaagatttccggaaggatccttgaagccagatcttggacccaagacatacattgcgtacggtttccatgaagagcttaatagaggagattcggtgacaaaacttcattgtgacatttctgacgcggtcaatgtgttgacacacacagctaaagtggaaatccctcccgtcaaataccaaaacataaaagtacatcagaaaaaatatgcagaagccatgttgcagaaacaacaatacagtggtcaagtgaaagaagccagcgaacttgaaaacaagtcaatgaaagaagtggatgaaagtaaaaaggatttaaaagacaaggcagctaacgaagaacaatcaaataacagttcaagaccgtcgggctcaggagaagctgagaaagtaattatttcaaaagaggataatcccacacaacctgctgtgagtacaagtgtggaatccatacaagaacagaagctggatgctccaaaagaaactgatggcaataccaatgagaggtcaaaggctgtgcatggtggtgctgtctgggatatctttcgaagagaggatgttccaaaacttattcagtttttgaaaaggcacgagcatgagtttcgtcacttcaataacgaacccctggaatccgttattcacccaattcatgaccagactatgttcttgagtgatagccagaagaaacagctgaaagaagaatttgatatagaaccatggacctttgagcaacacctcggcgaagcagtcttcatacctgcaggttgtcctcaccaagtgaggaatagacagtcttgcataaaggtggcactagactttgtggctcctgaaagcgtcgaagaatgccttaggctaacacaggagttccggagattgcctaaagaccacagttctagcgaggataaattggagcttaagaaaattgcactgtatgctgcgagttcagccataagagaggtaaaagggctaatgcaaagctcccgacgcagtgatacctaa

SEQ ID NO: 122 - protein, 840 aa, Arabidopsis thaliana
MEKMRGKRIRPRDSGELVEDGRSESERKTRKKENDVVSKGRIGRGRGRGEVSKRSIEIDISNPEKDIKPDGSRKCLGSTCHHCKILTSESDLIFCSKCNKKCYCFDCIKRSYSERTHEEVRAACPFCMMTCICRACLRLPLVIKPPSEKDTDVKLKQLQYLLVKVLPVLKDIYTEQNRELEIESTIRGHPVTEANIKRCKLDPSERIYCDLCRTSIANFHRSCPNKNCSVDICLSCCKELSEGFHQERDGKKNAEGKGYECRIPAGQGKDSDAYVPLHFSTWKLNSDSSIPCPPKECGGCGTSTLELRRLWKRDWVEKLITNAEKCTLNFRPTDVDIVHECSSCSTNSDSIRRQAAFRKNAHDNFLYSPNAVDLAEDDIAHFQFHWMKAEPVIVRNVLEKTSGLSWEPMVMWRACREMDPKRKGTEEETTKVKALDCLDWCEVEINLHQFFEGYLEGRMHKNGWPEMLKLKDWPPSDLFEKRLPRHNAEFIAALPFFDYTDPKSGILNLATRFPEGSLKPDLGPKTYIAYGFHEELNRGDSVTKLHCDISDAVNVLTHTAKVEIPPVKYQNIKVHQKKYAEAMLQKQQYSGQVKEASELENKSMKEVDESKKDLKDKAANEEQSNNSSRPSGSGEAEKVIISKEDNPTQPAVSTSVESIQEQKLDAPKETDGNTNERSKAVHGGAVWDIFRREDVPKLIQFLKRHEHEFRHFNNEPLESVIHPIHDQTMFLSDSQKKQLKEEFDIEPWTFEQHLGEAVFIPAGCPHQVRNRQSCIKVALDFVAPESVEECLRLTQEFRRLPKDHSSSEDKLELKKIALYAASSAIREVKGLMQSSRRSDT

SEQ ID NO: 123 - DNA, 2865 bp, Arabidopsis thaliana
atggatcagcttgcatctctagcagagtctgtggctatggaggaagattctgagaaacaatcgattaaaggagagagtagtcttgaacctgactctactccttctagtcctaaaataactgctaggtggaatccatcagaagcttgcaggcctttggttgatgacgctcccatcttttatcccactaatgaggattttgatgatccacttggttacatagagaagttgcgctctaaagcagaatcatatggcatatgtcgaattgtgccgcctgttgcatggaggcccccttgccctctgaaggagaaaaaaatatgggagaattctaaatttcccacccggattcagttcattgacttgcttcaaaaccgagaaccgattaaaaaatctactaaaaccaagaagagaaaacggagaagaatctctaaaattggatacacaagaagaaaaagagattcaggctgtgatacggcttcctctggctctagtgatagtgaaggaaaatttggttttcagactgggccagattttaccctggaagaatttcagaagtatgatgaatactttaaggaatgctattttcagtcagaggatcatcctggttccaaagcgtctgaaaataagaaatttaaacctaaggttaaggaccttgaaggtgaatattggcggatagtggagcaggcaactgatgaagtagaggtgtactatggagctgacttggaaacaaagaaatttggaagtggtttcccaaagtataaaccggggtatcctataagtgaagcagatcaatactctcaatgtggttggaacctaaataatttgtcccgtctgcccggatcagttctagcttttgagagctgcgatatctcaggagtcattgtgccatggctttatgttggaatgtgcttttcaactttttgttggcatgttgaagatcatcacctttattccatgaactacttacacacaggtgatccaaaagtttggtatgggatccctggaaaccatgctgagtcttttgaaaatgtaatgaaaaagcgtcttccagatttgtttgaagaacagcctgacttgctacatcaactggtcactcagttatctccaagaatcttaaaagaggagggagtacctgtctatcgagctgtccagcgcagtggagaattcattctaaccttccctaaggcctatcattctgggtttaattgtggtttcaactgtgcggaagcagtaaatgttgcaccagttgattggctggttcatggacagaatgcagtggaaggctatagcaagcagcggcgaaagagttcattgtcacatgacaagctgcttcttggagctgctatggaagctacttattgcctctgggagctttcactttcaaagaagaagactcctgtgattgcgagatggaaaagggtttgtagtgaggatggattgcttacgaaggcagtcaagaagcgtgtgcagatggaagaagaaagactaaatcaccttcaagatggttttagcttgcgaaagatggagggtgatttcgacaataagagagaacgggagtgcttcttgtgcttctatgatttgcatatgtctgcttcaagctgcaagtgttcccccaaccggtttgcatgtcttatccacgctaaggatctgtgttcatgtgaaagtaaggatagatatatcctaattcgccacaccttggatgagttatgggcactggtcagagctctagaaggggatcttgatgccatagacctatgggcaagtaaatgtcgtgaccagtatccttcacagcatccaagagcaagagaatatgcttacctcaagtctgccccatgtataaagagccgtggttcatcaaaagtacagcagcgagaacaaaacaatcttcagttagtgtctgaacgcttacaaagtgatctaacctcaaacaaggaagttcagttgaaacaagatggtgattcagatgtaaatcgccatggtcatgaaagcgaaagaaatcatgtacatgggatcactgataagtcagctgtcacggatgtaaaacttggtgtgggaggtaagtttgatgagaagaagatttcggttgaatctcaaaacccacattcagtttcagatgtagggtgtagcgagctggcgaagaaagtggatggttgtttaggagggaaggaccaaaatgctgcaaccaataggttaagtctctctgttgagcttttgagttctggatctctcgttgttaaaaagctgtggtgcagtaaacaggccatatacccaaaagggttcaagagccgtgttaagttcttaagtgtgcttgacccaacaaacctaaccaactacatctcagaggttctggatgcagggcttcttggtccattgttcagggtctcagtagaagattaccccactgagaatttctcgaatgtatctgctgaaaagtgctggcaaatggtgacacaaaggctcaaactcgaaatcatcaagaaatgtgatcaaccagttagctctttgacctctttacaacctttggagagtataaatgggcttgaaatgtttggatttctctccccgcacgtaattaaggtggttgaggctcttgatccaaagcatcaattggaggagtattggaaccaaaaagcagtgaaactgtttggtgctgaaccaataaaggaaggagaaaaggatgatacagagaaaggaggggcttcagatccctctttggaccgggacacaaggcttctgcgtggactgttgaagaaggcgacacctgaagaattagtaatgatgcatggacttctgtgtggtgagactcgcaacaccgagctcaaggaagagctctctactttggttgataagatggagataagtccttaa

SEQ ID NO: 124 - protein, 954 aa, Arabidopsis thaliana
MDQLASLAESVAMEEDSEKQSIKGESSLEPDSTPSSPKITARWNPSEACRPLVDDAPIFYPTNEDFDDPLGYIEKLRSKAESYGICRIVPPVAWRPPCPLKEKKIWENSKFPTRIQFIDLLQNREPIKKSTKTKKRKRRRISKIGYTRRKRDSGCDTASSGSSDSEGKFGFQTGPDFTLEEFQKYDEYFKECYFQSEDHPGSKASENKKFKPKVKDLEGEYWRIVEQATDEVEVYYGADLETKKFGSGFPKYKPGYPISEADQYSQCGWNLNNLSRLPGSVLAFESCDISGVIVPWLYVGMCFSTFCWHVEDHHLYSMNYLHTGDPKVWYGIPGNHAESFENVMKKRLPDLFEEQPDLLHQLVTQLSPRILKEEGVPVYRAVQRSGEFILTFPKAYHSGFNCGFNCAEAVNVAPVDWLVHGQNAVEGYSKQRRKSSLSHDKLLLGAAMEATYCLWELSLSKKKTPVIARWKRVCSEDGLLTKAVKKRVQMEEERLNHLQDGFSLRKMEGDFDNKRERECFLCFYDLHMSASSCKCSPNRFACLIHAKDLCSCESKDRYILIRHTLDELWALVRALEGDLDAIDLWASKCRDQYPSQHPRAREYAYLKSAPCIKSRGSSKVQQREQNNLQLVSERLQSDLTSNKEVQLKQDGDSDVNRHGHESERNHVHGITDKSAVTDVKLGVGGKFDEKKISVESQNPHSVSDVGCSELAKKVDGCLGGKDQNAATNRLSLSVELLSSGSLVVKKLWCSKQAIYPKGFKSRVKFLSVLDPTNLTNYISEVLDAGLLGPLFRVSVEDYPTENFSNVSAEKCWQMVTQRLKLEIIKKCDQPVSSLTSLQPLESINGLEMFGFLSPHVIKVVEALDPKHQLEEYWNQKAVKLFGAEPIKEGEKDDTEKGGASDPSLDRDTRLLRGLLKKATPEELVMMHGLLCGETRNTELKEELSTLVDKMEISP

SEQ ID NO: 125 - DNA, 2694 bp, Arabidopsis thaliana
atgatactgcttcatggtcaggattttgatgatccacttggttacatagagaagttgcgctctaaagcagaatcatatggcatatgtcgaattgtgccgcctgttgcatggaggcccccttgccctctgaaggagaaaaaaatatgggagaattctaaatttcccacccggattcagttcattgacttgcttcaaaaccgagaaccgattaaaaaatctactaaaaccaagaagagaaaacggagaagaatctctaaaattggatacacaagaagaaaaagagattcaggctgtgatacggcttcctctggctctagtgatagtgaaggaaaatttggttttcagactgggccagattttaccctggaagaatttcagaagtatgatgaatactttaaggaatgctattttcagtcagaggatcatcctggttccaaagcgtctgaaaataagaaatttaaacctaaggttaaggaccttgaaggtgaatattggcggatagtggagcaggcaactgatgaagtagaggtgtactatggagctgacttggaaacaaagaaatttggaagtggtttcccaaagtataaaccggggtatcctataagtgaagcagatcaatactctcaatgtggttggaacctaaataatttgtcccgtctgcccggatcagttctagcttttgagagctgcgatatctcaggagtcattgtgccatggctttatgttggaatgtgcttttcaactttttgttggcatgttgaagatcatcacctttattccatgaactacttacacacaggtgatccaaaagtttggtatgggatccctggaaaccatgctgagtcttttgaaaatgtaatgaaaaagcgtcttccagatttgtttgaagaacagcctgacttgctacatcaactggtcactcagttatctccaagaatcttaaaagaggagggagtacctgtctatcgagctgtccagcgcagtggagaattcattctaaccttccctaaggcctatcattctgggtttaattgtggtttcaactgtgcggaagcagtaaatgttgcaccagttgattggctggttcatggacagaatgcagtggaaggctatagcaagcagcggcgaaagagttcattgtcacatgacaagctgcttcttggagctgctatggaagctacttattgcctctgggagctttcactttcaaagaagaagactcctgtgattgcgagatggaaaagggtttgtagtgaggatggattgcttacgaaggcagtcaagaagcgtgtgcagatggaagaagaaagactaaatcaccttcaagatggttttagcttgcgaaagatggagggtgatttcgacaataagagagaacgggagtgcttcttgtgcttctatgatttgcatatgtctgcttcaagctgcaagtgttcccccaaccggtttgcatgtcttatccacgctaaggatctgtgttcatgtgaaagtaaggatagatatatcctaattcgccacaccttggatgagttatgggcactggtcagagctctagaaggggatcttgatgccatagacctatgggcaagtaaatgtcgtgaccagtatccttcacagcatccaagagcaagagaatatgcttacctcaagtctgccccatgtataaagagccgtggttcatcaaaagtacagcagcgagaacaaaacaatcttcagttagtgtctgaacgcttacaaagtgatctaacctcaaacaaggaagttcagttgaaacaagatggtgattcagatgtaaatcgccatggtcatgaaagcgaaagaaatcatgtacatgggatcactgataagtcagctgtcacggatgtaaaacttggtgtgggaggtaagtttgatgagaagaagatttcggttgaatctcaaaacccacattcagtttcagatgtagggtgtagcgagctggcgaagaaagtggatggttgtttaggagggaaggaccaaaatgctgcaaccaataggttaagtctctctgttgagcttttgagttctggatctctcgttgttaaaaagctgtggtgcagtaaacaggccatatacccaaaagggttcaagagccgtgttaagttcttaagtgtgcttgacccaacaaacctaaccaactacatctcagaggttctggatgcagggcttcttggtccattgttcagggtctcagtagaagattaccccactgagaatttctcgaatgtatctgctgaaaagtgctggcaaatggtgacacaaaggctcaaactcgaaatcatcaagaaatgtgatcaaccagttagctctttgacctctttacaacctttggagagtataaatgggcttgaaatgtttggatttctctccccgcacgtaattaaggtggttgaggctcttgatccaaagcatcaattggaggagtattggaaccaaaaagcagtgaaactgtttggtgctgaaccaataaaggaaggagaaaaggatgatacagagaaaggaggggcttcagatccctctttggaccgggacacaaggcttctgcgtggactgttgaagaaggcgacacctgaagaattagtaatgatgcatggacttctgtgtggtgagactcgcaacaccgagctcaaggaagagctctctactttggttgataagatggagataagtccttaa

SEQ ID NO: 126 - protein, 897 aa, Arabidopsis thaliana
MILLHGQDFDDPLGYIEKLRSKAESYGICRIVPPVAWRPPCPLKEKKIWENSKFPTRIQFIDLLQNREPIKKSTKTKKRKRRRISKIGYTRRKRDSGCDTASSGSSDSEGKFGFQTGPDFTLEEFQKYDEYFKECYFQSEDHPGSKASENKKFKPKVKDLEGEYWRIVEQATDEVEVYYGADLETKKFGSGFPKYKPGYPISEADQYSQCGWNLNNLSRLPGSVLAFESCDISGVIVPWLYVGMCFSTFCWHVEDHHLYSMNYLHTGDPKVWYGIPGNHAESFENVMKKRLPDLFEEQPDLLHQLVTQLSPRILKEEGVPVYRAVQRSGEFILTFPKAYHSGFNCGFNCAEAVNVAPVDWLVHGQNAVEGYSKQRRKSSLSHDKLLLGAAMEATYCLWELSLSKKKTPVIARWKRVCSEDGLLTKAVKKRVQMEEERLNHLQDGFSLRKMEGDFDNKRERECFLCFYDLHMSASSCKCSPNRFACLIHAKDLCSCESKDRYILIRHTLDELWALVRALEGDLDAIDLWASKCRDQYPSQHPRAREYAYLKSAPCIKSRGSSKVQQREQNNLQLVSERLQSDLTSNKEVQLKQDGDSDVNRHGHESERNHVHGITDKSAVTDVKLGVGGKFDEKKISVESQNPHSVSDVGCSELAKKVDGCLGGKDQNAATNRLSLSVELLSSGSLVVKKLWCSKQAIYPKGFKSRVKFLSVLDPTNLTNYISEVLDAGLLGPLFRVSVEDYPTENFSNVSAEKCWQMVTQRLKLEIIKKCDQPVSSLTSLQPLESINGLEMFGFLSPHVIKVVEALDPKHQLEEYWNQKAVKLFGAEPIKEGEKDDTEKGGASDPSLDRDTRLLRGLLKKATPEELVMMHGLLCGETRNTELKEELSTLVDKMEISP

SEQ ID NO: 127 - DNA, 4023 bp, Arabidopsis thaliana
atgggtaatgttgaaattccgaattggcttaaagctttgccattggcacctgtgtttagacctacagacactgaatttgcagatcccattgcttacatatcgaaaatcgaaaaggaagctagtgcctttgggatttgcaagatcattcctcctttacccaagccatcgaaaaagtatgttttctacaacttgaacaagtctcttttgaagtgtcccgaattggtttcagatgttgacatttcgaaggtgtgtaaagaggatagagctgtattcaccactaggcagcaagagttaggccaaactgtgaaaaaaaacaaaggagagaagggtaagagtaattctcaaaggagtggtgttaagcaggtttggcaaagtggaggcgtttatacattggatcagtttgaagctaagtcgaaagctttctacaaaacccaattaggaacggttaaggaactggcaccagttgtcattgaggcattgttctggaaagcggctttagagaagcctatatatatagagtatgctaatgacgtgcctggctctgctttcggtgagccagaggatcatttcaggcatttccggcagaggaagaggaggggcaggggattttatcagaggaagacagaaaataatgatccatcaggtaagaacggtgaaaagtcatcgcctgaggtagaaaaggcaccccttgcttctacaagtttatcatctcaggattcgtccaagcagaagaacatggatattgttgatgaaatggaaggtactgcaggctggaagctctccaacagttcgtggaaccttcagatgattgcacgttcacctggttctgttacacgtttcatgccagatgacattcctggtgttacatctcccatggtttatatcggtatgttgttcagttggtttgcctggcacgttgaggatcatgagcttcacagtatgaattatcttcacactggctcaccaaagacttggtacgctgtcccttgtgattatgcgcttgactttgaagaggttatccgcaaaaattcttatggcaggaacattgaccaactggctgctctcacccaactaggcgaaaagacaactcttgtatcacctgagatgatagttgcatctggcattccctgctgtaggttggtacaaaatcctggtgaatttgttgtgacttttccgaggtcttatcatgtaggattcagccacggttttaactgtggggaagccgctaattttggaaccccacagtggctcaacgtagcaaaggaagctgctgtgcgtcgggcagccatgaattatctacccatgctgtcccatcagcagctgctatatctcttgactatgtcctttgtttcaagagtgccacgatcattgctaccaggtggtcgtagctcccgactaagagatcggcagagagaagaaagagagttccttgtgaaaagagcttttgtagaagatatattgaacgaaaacaagaatttatctgttcttcttcgagaaccaggctctcgtttggtgatgtgggaccctgatttacttccgcgtcatagcgcactggctcttgcagctgctggagttgctggtgcttctgctgtttcacctccagcagtggcaaaaaaagaacttgaggagggtcattctgaattgcagaataaagaaaagacttctcttttagaggaattgagcttgttcatggagaagctgaatgatgtatactacgacgatgatgatggtctgcttaacgatttccaagttgatactggaaccttgccatgtgtggcttgtggcgttcttggcttcccctttatgtctgtggtacagccttctgaaaaagcattaaaagatctctcagagagacaaggagagacagatgctcaggaaattatgacactgtcatcagaaaagtctgactgcgaatggaaaacgtcttctagatatataagacctcgcattttctgcctcgaacacactattgaacttcagagactgctgcaatcaagaggtggattgaaattccttgttatttgccataaagactttcaaaaattcaaggcacatgcggctatagtggcagaggaggtcaaagtccctttcagctatgatgatgtcctgttagagagtgcatctcaggaagagttgagtctaattgatcttgcaattgaagatgaagaaaaatacgaacacagtgtagactggacctcagaacttggcatcaatttacggtactgtgtgaaagtgaggaaaaattcccctactaagaaaattcagcatgcactgtcactaggtggcttgttctccgatacaagccagatgctagattttacaactatcagatggctgcagagaaaatcacgctcaaaagctaaacccagttctacctcaagtttcacaccttgtgaacatcttgaagtaaaagcagatggaaaattaagggataatttggattctcagaccggaaaaaaggaagaaaagatcatccagtactcgagaaagaaaaagttgaatccaaagccttcagcagaacaagttcaggagctagctaccctagctaaatcaaaagattttgataagacatgtaaaaattttagcagtaggtcacatctggatagtgcaattcgttctgagatgaacagtgagattggagactctggaagggtcattggggtatcattttccataaatccttgtagctcatctttcactgtgggacatgggcaagaacatcccgagatcactgtcaagtttggttcagatttagatgggaatgtcacaaatagtttgagtatggtgaatggagactctgctgacctaaccttaacctccatatccagagagcagcaccaaggacactctatgaccagcaataataatggctccaactcaggtagtcatgttgtggcaagccagaccatacttgtttctacaggtgataatcatgacggaccaagaaaattgtctggtgattatgtctgcagtgatgtgtctgtacgtggtattcaggaagcggttgaaatgagtgaccaagagtttggagaacctaggtctactgtcactaatattgaggatgaacagcaatcacagattgtgaaaccaacccaaagagaagctgtatttggtgatcacgaacaggtggagggagcagaagctgtgtctaccagagaaaacttgtgctctgaaataattctgcacactgagcattcttcagctcatgtgggtatggaaattcctgacataaacacggccagtgagaacttagttgttgacatgacccatgatggtgaacctttggaaagtagcgatatattaagttcgagcaatggtgatgaagcttcttcaaatggattgcaagttctaaatgatgagcttagcatggagagtgaagtttcaagctcagaaaacaccgaagttattgaggctcccaattctatgggagaagcaaagaagaagcggaaaatagaatcagagtctgagacaaatgataatccagagagtagcattggtttcataaggagtccttgtgaagggttgaggtcaaggggcaagaggaaagcaacatgtgaaacttcattaaagcacactgaaacgagtgatgaagagaagaaacccattgcgaaaaggctgaagaaaacaccaaaggcttgctcagggagtcgtcagcaagaagtccccacgacaactcaccccaaccgttgttacctagagggatgcaagatgacttttgagagtaaagcgaaattacaaactcacaagagaaaccgttgcactcacgaagggtgtggaaagaaattcagggctcacaaatatctggtgcttcatcaacgtgtgcataaggatgaaagacctttcgagtgctcttggaaaggatgttcaatgactttcaaatggcaatgggcgaggacagaacatttgcgtctgcacacgggagagcgaccatacatatgcaaggtcgatggatgtggattgtcgtttaggtttgtatctgactatagtcgccacagacgtaaaaccatgcactatgtcacatag

SEQ ID NO: 128 - protein, 1340 aa, Arabidopsis thaliana
MGNVEIPNWLKALPLAPVFRPTDTEFADPIAYISKIEKEASAFGICKIIPPLPKPSKKYVFYNLNKSLLKCPELVSDVDISKVCKEDRAVFTTRQQELGQTVKKNKGEKGKSNSQRSGVKQVWQSGGVYTLDQFEAKSKAFYKTQLGTVKELAPVVIEALFWKAALEKPIYIEYANDVPGSAFGEPEDHFRHFRQRKRRGRGFYQRKTENNDPSGKNGEKSSPEVEKAPLASTSLSSQDSSKQKNMDIVDEMEGTAGWKLSNSSWNLQMIARSPGSVTRFMPDDIPGVTSPMVYIGMLFSWFAWHVEDHELHSMNYLHTGSPKTWYAVPCDYALDFEEVIRKNSYGRNIDQLAALTQLGEKTTLVSPEMIVASGIPCCRLVQNPGEFVVTFPRSYHVGFSHGFNCGEAANFGTPQWLNVAKEAAVRRAAMNYLPMLSHQQLLYLLTMSFVSRVPRSLLPGGRSSRLRDRQREEREFLVKRAFVEDILNENKNLSVLLREPGSRLVMWDPDLLPRHSALALAAAGVAGASAVSPPAVAKKELEEGHSELQNKEKTSLLEELSLFMEKLNDVYYDDDDGLLNDFQVDTGTLPCVACGVLGFPFMSVVQPSEKALKDLSERQGETDAQEIMTLSSEKSDCEWKTSSRYIRPRIFCLEHTIELQRLLQSRGGLKFLVICHKDFQKFKAHAAIVAEEVKVPFSYDDVLLESASQEELSLIDLAIEDEEKYEHSVDWTSELGINLRYCVKVRKNSPTKKIQHALSLGGLFSDTSQMLDFTTIRWLQRKSRSKAKPSSTSSFTPCEHLEVKADGKLRDNLDSQTGKKEEKIIQYSRKKKLNPKPSAEQVQELATLAKSKDFDKTCKNFSSRSHLDSAIRSEMNSEIGDSGRVIGVSFSINPCSSSFTVGHGQEHPEITVKFGSDLDGNVTNSLSMVNGDSADLTLTSISREQHQGHSMTSNNNGSNSGSHVVASQTILVSTGDNHDGPRKLSGDYVCSDVSVRGIQEAVEMSDQEFGEPRSTVTNIEDEQQSQIVKPTQREAVFGDHEQVEGAEAVSTRENLCSEIILHTEHSSAHVGMEIPDINTASENLVVDMTHDGEPLESSDILSSSNGDEASSNGLQVLNDELSMESEVSSSENTEVIEAPNSMGEAKKKRKIESESETNDNPESSIGFIRSPCEGLRSRGKRKATCETSLKHTETSDEEKKPIAKRLKKTPKACSGSRQQEVPTTTHPNRCYLEGCKMTFESKAKLQTHKRNRCTHEGCGKKFRAHKYLVLHQRVHKDERPFECSWKGCSMTFKWQWARTEHLRLHTGERPYICKVDGCGLSFRFVSDYSRHRRKTMHYVT

SEQ ID NO: 129 - DNA, 1509 bp, Arabidopsis thaliana
atgccaaagtgcaagaatctgttgctaacctcgaagcgacgtaaatccaaatccaaaagactaaagctccatcagcatgaacctgagtctctgtttccagagaaggaggtagaagaggaagatgaagatgaaggaggcttcaagctgaaaattgcagctccttctcaagagcatggagttcaacctctgggaaacctatatttcaatcctggtgcggtcaatgtgcgaaacactggattaggtaatctccagatactctcagatgagctcgttttggatattctaggtcttcttggcgccaatcatttgggtgttttggctactgtaactaagtcattctatatatttgctaatcatgagcctctctggagaaatcttgtgttagaggagttaaaaggagattttttgtttaatgggtcgtggagatctacctatgtagctgcttaccatccgaaattcaagtttgctggagatggtgaatcgaatttgaagattatagatttctattctgattatctgtttcagagctggttatgtgcgaatcttgaaatgaaaccgaaatggcttagaagagataatatcacacgggtgagaggcatttctgttgaagacttcattacaaagtttgaggagccgaataagccagttttgttggagggatgtttggatggttggcctgctattgagaaatggtcaagagattatctgactaaggtggttggtgatgtcgaattcgcggtaggtccagtggaaatgaagctcgagaagtattttaggtattctgatggagctagggaagaaaggcctttgtacttgtttgatccaaagtttgcagagaaagttccggttttggattcggagtatgatgttcctgtctatttcagagaggacttgtttggtgttttaggaaacgagcgacctgattatagatggatcataattggtccagccggatcaggatcgtctttccatattgatcctaactcaacatcagcttggaatgcggtgatcacagggtcgaagaaatgggttttgttcccacctgatgtggttcctccgggtgtgcatccaagtcctgatggagcagaagtggcctgtcctgtttccataatagaatggttcatgaacttttatgatgatactaaggattgggagaagaaacctattgagtgtatatgcaaagccggggaggtgatgtttgtacctaatggatggtggcatctggtgattaacctggaggaatcgattgctattactcagaattatgctagcaggagtaatttgttgaatgtgttagaatttctgaagaaaccaaatgctaaagaacttgtctccgggacaactgacagagagaatttgcatgacaaattcaagaaagccattgaagaagcttacccggggactatccaagagttagaaaagaaagcagaagaagcaaaaagagccgaagaacaaagagtttctttctgggactctgccaaaactgatactttcaagttttctttctaa

SEQ ID NO: 130 - protein, 502 aa, Arabidopsis thaliana
MPKCKNLLLTSKRRKSKSKRLKLHQHEPESLFPEKEVEEEDEDEGGFKLKIAAPSQEHGVQPLGNLYFNPGAVNVRNTGLGNLQILSDELVLDILGLLGANHLGVLATVTKSFYIFANHEPLWRNLVLEELKGDFLFNGSWRSTYVAAYHPKFKFAGDGESNLKIIDFYSDYLFQSWLCANLEMKPKWLRRDNITRVRGISVEDFITKFEEPNKPVLLEGCLDGWPAIEKWSRDYLTKVVGDVEFAVGPVEMKLEKYFRYSDGAREERPLYLFDPKFAEKVPVLDSEYDVPVYFREDLFGVLGNERPDYRWIIIGPAGSGSSFHIDPNSTSAWNAVITGSKKWVLFPPDVVPPGVHPSPDGAEVACPVSIIEWFMNFYDDTKDWEKKPIECICKAGEVMFVPNGWWHLVINLEESIAITQNYASRSNLLNVLEFLKKPNAKELVSGTTDRENLHDKFKKAIEEAYPGTIQELEKKAEEAKRAEEQRVSFWDSAKTDTFKFSF

SEQ ID NO: 131 - DNA, 2124 bp, Arabidopsis thaliana
atgaaggaaaaagtggagaagcttgagacagatgatctaaaatggaccgagaggcttccagaatgtcctgtctacagaccaacaaaggaggagtttgaggatcctctgacttatttgcagaagattttcccagaagcttcaaaatatggtatttgcaagattgtatctcctttgacagcaacagttcctgctggcgctgtgttgatgaaagagaaatcaaactttaagttcactaccagagtacaaccccttcgacttgctgagtgggattctgatgataaagttacattcttcatgagtgggaggacctatacatttcgcgactatgagaaaatggcgaacaaggtatttgcacgcagatattgcagtggtggctctttgcccgactcattcttggagaaagaattctggaaggaaattgcgtgtggcaagactgaaacagttgagtatgcgtgtgatgtagatggtagcgcattttcatctgcaccaggtgacccactaggaagcagcaaatggaacttgaataaagtttcaaggcttcctaagtctaccctgcgccttcttgaaacatccattccgggagtcacagaacccatgctttacatcggaatgcttttcagtatgtttgcctggcatgttgaggaccattatttgtacagcattaattaccaacattgtggagcatcaaaaacttggtatgggattccaggttccgcagctctaaaatttgaaaaggtggttaaagagtgtgtgtacaatgatgatattctatcaactaatggagaagatggtgcctttgacgtgcttctggggaagacaactatattccccccaaagactctgttggatcataatgtgccagtgtataaagctgtgcaaaaacctggagaatttgttgtcacattccccagggcttatcatgctggtttcagccacggttttaattgtggtgaggcagtgaactttgcgatgggtgattggtttccatttggagctattgccagttgccggtatgctcatcttaaccgagtaccgttgcttcctcatgaagaattgatttgtaaagaggcaatgctcttgaactcaagttccaaatccgagaatctggatcttacacctacagaattgtcaggacaacgaagcatcaagactgcatttgtacacctgattcgttttcttcatcttgctcgatggtctctaatgaagtcaggattatgcacaggccttgtttcgaatacatatggaaccatagtctgcagtttgtgtaaacgggattgctatttggcatttatcaactgcgagtgttactcacaccccgtttgtctacgtcatgatgttaaaaagcttgaccttccatgtgggacaacgcatactctttacttgagagacaacattgaagacatggaagctgctgcaatgaagtttgagaaggaagatggagtttcagatttgattacaactgatgaagatttatataagtatccatcatcgattacacttccagctgcgaaagaagacggatatacaccgtattccactatatactttgatttctatactgaggtagagatgacatctcatgaccagttgcaatcgggaaatcccgtcatgagttatgaggcaaacgcttcatgtatctcctcagttgctgatgattatgaatgctctgattaccaggtaaatagacgagctaactgtagcagcagtagtgattcaaagctctcggaagaagtagcatgcagcagtagcaaaaaaactcggttcttccctgtggttcaagatgaacaactagttgcggatcaggaaagtgatggatctgattccgagtgttttagagtcaaacgccgttcttcattgaagtttgagaaccgaacagttgttctagacacaagagagtctgaccatcatcaggaacttaagagactgaagaaatcgcatcatcacgaaggaagatatagtagtagcagtagtgttagtaggcaagaagaagaagaagatgagttagtaatttcaaacaggaaagaaactcagcaacaaagtgacgtgaagatgcagaagaagaggatcgagaatcattttggtggctttaaacgtctgaaagtgaaagggctaataaagccgtaa

SEQ ID NO: 132 - protein, 707 aa, Arabidopsis thaliana
MKEKVEKLETDDLKWTERLPECPVYRPTKEEFEDPLTYLQKIFPEASKYGICKIVSPLTATVPAGAVLMKEKSNFKFTTRVQPLRLAEWDSDDKVTFFMSGRTYTFRDYEKMANKVFARRYCSGGSLPDSFLEKEFWKEIACGKTETVEYACDVDGSAFSSAPGDPLGSSKWNLNKVSRLPKSTLRLLETSIPGVTEPMLYIGMLFSMFAWHVEDHYLYSINYQHCGASKTWYGIPGSAALKFEKVVKECVYNDDILSTNGEDGAFDVLLGKTTIFPPKTLLDHNVPVYKAVQKPGEFVVTFPRAYHAGFSHGFNCGEAVNFAMGDWFPFGAIASCRYAHLNRVPLLPHEELICKEAMLLNSSSKSENLDLTPTELSGQRSIKTAFVHLIRFLHLARWSLMKSGLCTGLVSNTYGTIVCSLCKRDCYLAFINCECYSHPVCLRHDVKKLDLPCGTTHTLYLRDNIEDMEAAAMKFEKEDGVSDLITTDEDLYKYPSSITLPAAKEDGYTPYSTIYFDFYTEVEMTSHDQLQSGNPVMSYEANASCISSVADDYECSDYQVNRRANCSSSSDSKLSEEVACSSSKKTRFFPVVQDEQLVADQESDGSDSECFRVKRRSSLKFENRTVVLDTRESDHHQELKRLKKSHHHEGRYSSSSSVSRQEEEEDELVISNRKETQQQSDVKMQKKRIENHFGGFKRLKVKGLIKP

SEQ ID NO: 133 - DNA, 1389 bp, Arabidopsis thaliana
atgggaatacagattataggtcaaattgagagaatcaatggtaaagagctgagttacggcgattttgcagagagatacttagctaagaaccagccagtggtaatatccgatctcactgaagattggcgagctcgggaagattgggtcagtgagaatggaaaccctaatctccacgtatttgccactcactttggaaaatccagagttcaggttgcagattgtgatacgagagaatttacagatcagaaaagattagaaatgtctgttactgaatttgtggagcaatggactaataaggattctattgaggaatctgttttgtatctgaaagattggcactttgtgaaggagtatccagactatacagcttaccaaacaccgccgttgttttctgatgattggcttaacgtgtatctagacaattaccaaatgcatgaggatagagatagtttccagaagtatgatcaaataagctgctctgattatcggtttgtttatatgggtgggaaaggatcttggacacctctacatgctgatgtatttagatcttatagttggtcagctaatgtctgtggtaaaaaaagatggcttttccttcctcctcctcaaagtcatcttgtttatgacaggtacatgaaaaattgcgtttatgacatttttgaagaggtgaatgaaactaaattccctggttttaagaagaccacctggcttgagtgcattcaagaacccggtgaaattatctttgttcccagtggatggcatcatcaagtatataacttggaagacacaatatctattaaccacaattggctcaacgcatacaacctatcttgggtgtgggatctactgtggaaggactacaaggacactgaagagtcaatagaagacataagagacatatgtgatgattttgaagctatctgccaacgtaatcttgctgccaacacaggaatgaatttaaatgatttcttcctcttcatgtcacggttctctttggggaacatggttctactgcaatcttactctgacaaacacaaaaacctgaattcgtgttcattagcaatggcccaaaacctgttaatgaatctctcaactatactgaaagtcatgatgaagatgatatctgcaggcggtgtaactgcagaggaagtgtatctggacttgcgagaaacactggaggatccacagtttctcagatttgtcagagacatgggaagaacttatgcaaggattcacatggaggaagaggatcagtttctttcttcgaaagaattattacaaaagctcagtggtcttgcaggtccaaatatgcaaatatgttctccaaaggatcttgttgaaatgataaaccatcacaatactttttcctcccaaatctattttatttag

SEQ ID NO: 134 - protein, 462 aa, Arabidopsis thaliana
MGIQIIGQIERINGKELSYGDFAERYLAKNQPVVISDLTEDWRAREDWVSENGNPNLHVFATHFGKSRVQVADCDTREFTDQKRLEMSVTEFVEQWTNKDSIEESVLYLKDWHFVKEYPDYTAYQTPPLFSDDWLNVYLDNYQMHEDRDSFQKYDQISCSDYRFVYMGGKGSWTPLHADVFRSYSWSANVCGKKRWLFLPPPQSHLVYDRYMKNCVYDIFEEVNETKFPGFKKTTWLECIQEPGEIIFVPSGWHHQVYNLEDTISINHNWLNAYNLSWVWDLLWKDYKDTEESIEDIRDICDDFEAICQRNLAANTGMNLNDFFLFMSRFSLGNMVLLQSYSDKHKNLNSCSLAMAQNLLMNLSTILKVMMKMISAGGVTAEEVYLDLRETLEDPQFLRFVRDMGRTYARIHMEEEDQFLSSKELLQKLSGLAGPNMQICSPKDLVEMINHHNTFSSQIYFI

SEQ ID NO: 135 - DNA, 1188 bp, Oryza sativa
atgtcgatgcgggagtttgtcgaccactgggctgcgagttcgagcaatggggattctgatggttccctgctgtacctgaaagattggcattttgtgaaggagtaccctggttatgttgcatacaccacaccaacattctttgccgatgattggctcaacatgtatcttgatagtcatcctatacatcgagattctgacattgccaaccatacaaatgaaataaactgtgctgactatcggtttgtttacatgggaccaaaaggaacttggactcctcttcatgctgatgtttttaggtcatacagctggtcggcaaatgtatgcggcagaaaactatggctctttctaccaccatcacaaagtcattttgtatttgataggaacctacgatcttcggtctataacataaatgatgatgtttctgaaaagcagtttcctgaattcaataatactaaatggctagagtgcactcaggagcagaatgaaatcatttttgtgcctagtgggtggtatcaccaagtccataacctggaggatactatatcaataaaccataattggtttaatggctacaaccttcattgggtgtggaacttgcttcatgaagattacaaggtagcaaaagattatattgaagacattcgggacatatgtgacgattttgagggactatgtcaacgcaacttagcagcaaatacaggcatgaacttctatgacttcttcgtcttcataacacgttttgctttagccaatatagttgagctttaccatattcagaatccaaaagatactgacttcatttcagccgaaactgctaaccactttgtctataatctcatgtcgatccgtgatgttgcatcaaaaatggtatctacagaagctttcaataccgagaatatttgtaatatctcagaacaaaaccggagtgctttctctgatatcataaaaatattggaagaagagagtttcagaaggttattggtggcgttgtcaaaggcatataattacatagacagaggacaaaaagattgtctcaaaatgaaggattcaagtcagaagggttgtttgtcagtaacctgcttaaaacctgactgtaatgttgttggtgacattatttctttcatgcgtgagattcatggacctatggatttggtaacactaattgatagtgctctctctgatagatag

SEQ ID NO: 136 - protein, 395 aa, Oryza sativa
MSMREFVDHWAASSSNGDSDGSLLYLKDWHFVKEYPGYVAYTTPTFFADDWLNMYLDSHPIHRDSDIANHTNEINCADYRFVYMGPKGTWTPLHADVFRSYSWSANVCGRKLWLFLPPSQSHFVFDRNLRSSVYNINDDVSEKQFPEFNNTKWLECTQEQNEIIFVPSGWYHQVHNLEDTISINHNWFNGYNLHWVWNLLHEDYKVAKDYIEDIRDICDDFEGLCQRNLAANTGMNFYDFFVFITRFALANIVELYHIQNPKDTDFISAETANHFVYNLMSIRDVASKMVSTEAFNTENICNISEQNRSAFSDIIKILEEESFRRLLVALSKAYNYIDRGQKDCLKMKDSSQKGCLSVTCLKPDCNVVGDIISFMREIHGPMDLVTLIDSALSDR

SEQ ID NO: 137 - DNA, 3861 bp, Oryza sativa
atgaggccctcgccgcctcccgccgccccggcggcggaaccggtgcccccgtggctgagatcgctgcccgtcgcgcccgagttccgccccaccgccgccgagttcgccgatcccgtctcctacatcctcaagatcgagcccgccgcggcgccgtacggcatctgcaaggtcgtgccgccgttgcccccgccgccgaagaaggccaccttctccaacctctcccgctccttcgccgcgctccacccggacgaccgctcgccgtccttccccacccgccaccagcaggtcggcctctgcccgcgccgcacgcgcccggggctcaagcccgtgtggcggtcctcccaccgctacacgctcccgcagttcgagtccaaggccggcgccacccgcaagtcgctcctcgccggcctcaacttccctgcctccaggcaactcaccccgctcgaccacgaggtgctcttctggcgcgcatcggccgaccgccccatcgtggtcgagtatggcagcgacatgtcgggctcgggattctccccttgcgccgcgcagccgcagccgccgccgcagcagcaaccgacggcgcgggcggcggcgcaccttggggagacggcgtggaacatgcgcggcgtggctaggagccccggatcgctgctgcggttcatgccggaggatgtccccggggtcaccacgccgatgctctacgtcgggatgatgttcagttggttcgcgtggcacgtcgaggaccacgacctgcacagcctcaactacatgcacctcggggccgccaagacgtggtacggcgtgccgcgcgacgccgcgctcgcgttcgaggacgtggtgcgcgaacatggctacggcggggaggtgaaccccctagaaaccttcgctacattggggcagaaaacaacagtgatgtcccctgaagtgcttgtggagtcgggtatcccctgctgcagattggtgcagaatgcaggggaatttgtggtcacttttccaggatcttatcactgcggtttcagtcatggattcaactgtggggaagcatcaaatatagctactcctgaatggttgagaatagcaaaagaggcagcaatccgaagagcttcaatcaatcgtcctcccatggtttcgcactatcaattactttacgatctcgcactgtctatgcgttttagggaaccatccaatggtgaaatggagacacggagctctcgaataaaggagaagaagaaatgcgaaggggaacaactggtcaagaagatgttcatccaaaatgttattgaagataatgaactgcttagtcatcttctaaatgacggatcatcttgtattattcttccagcaaatgcccatgatggtcctggtctttctactttgcgctcaacagatcaatcaaatatgaattccagaatatcacataacctatgcagtagggaagaagctccagaagcctcaggatgcttatcgccgaacaggaatggtgataccagaaattgtatttcatcagatacgcataacatggaaggtgataagggagatataatgagcgctactggattgttagatcagggtctattatcatgtgtcacttgtggaattttaagtttttcatgtgtggctgtactcaaaccaagagattctacagcacgatacttgatgtctgctgattctaattcaattaataaccagctttctatttctggagggagtattctggcagatgcgccaacaaatgaaaggaatggtgtcatttctcgtccatattctgaacactgttgcaacgaaataatggccgatgatgcagaaatcgataagaattctgctcttgatctcttggcatttgctcatgggggtcaaccagatcctgaagaagatccactggagaaaatactgaagattgcacatggcattaacaaatcacaacctaatagttcaaataatgttggttgtgttggaacaaagctgtcctcaagtagcacagagcgccaagaaagaccatcttcccagaacgctcattgtaatggtagctcagttatttcaaatggaccgaaaggtgttcgcacgagaaataagtatcaacttaagatggtactttctgaaggttttcaggcaaaggatatctattctgcgaaggaaaagaaggttcaatcagaaccatcaagctcaaaaggggatgttaaggagacaattgatgttagtggcacagagaacgatgtcggatgtaaaagcactacaatctctgtcagtgaacacaggggttctacaaagaatatgtattcagtgaaggaaaagaaggttcaatcgaaaccatcaagcttaaaggggactgttaaagagacagttgatgtcagtggcacagagaacgatgctagatgtaaaagcattacaatctctgtcagtgaacacaggggttctacacctatgaccaatagtttagctgcatcaatcgtgaaacctgacaaggattcatcaagaatgcatgtattttgtcttgagcatgctattgaggttgagaagcaactgcatgctataggtggttctaatattatgcttatatgtcgtccagaatatcccaaaatagaagcggaagcaagattgttgggtgaagaaatgggactggtatatgactggaagggcattcatttcaaggaggccaacatggaggacaggcagaagatacaggaagttctgcgggatgaggaagcaatacctacaagcagtgattgggctgtaaaattgggtattaacctttattatagtgcaaatctggccaaatctcctttatataacaaacaaatgccatacaacagagtcatttatagggcatttggctgtgattctcctaatgactcgccagtaatgttcaatacttgcgaaaggaaacaaagccaccagaagaaaatagtggttgctggccggtggtgtgggaaagtatggatgtcaaaacaggtccatccatacttggctcacagagttgaaagccaggaagcggaagaagcagatagaatctgttcttatcattttgatgagaagcacaaagctgagccagttgggaattctagtagagtggaagcctccaaaagaaagagtagcagtttgacagacgtaacagaatcaagcaatagaaggggggaaatacctggtgaggaaacaaacaccaagaggcccaaacattctcaagagaacaatctcagagctttggaaaccgctgctgaagttgtggtgccctcaccagctggaacaggtctccgcgttagctccaggattgccaacagggcaaacaagctaaaatcaaagatggaaaaggaggatgtcccttctagccgtccaaagtctaacataaaggagaaaagcagtcatgctagcggtcagaaatcaaatgttcaagaggcgaatgctaattctgctagccatttgagagcaatgccaccaaaacagaaggctgaagcagaagcaaagaagcaaataagaactccaaaacctccaaagcaagcagtggagtactcgtgcgatattgagggttgttctatgagttttcgtacaaagcgggacttgtctctgcacaagagtgatatctgcccagtgaaaggctgcgggaagaagttcttctcgcacaagtatctgctgcagcatcgcaaggttcacacagatgaccgtccgctaacatgcccatggaagggctgcaacatggcattcaagtggccatgggcaaggactgaacatctcagggttcatacaggcgacaggccctatgtttgccatgagccaggttgcgcacagacattcaggtttgtctcagatttcagccgtcacaagcgcaagacaggtcattctgtcaagaagaagaagaaagcaaagagttga

SEQ ID NO: 138 - protein, 1286 aa, Oryza sativa
MRPSPPPAAPAAEPVPPWLRSLPVAPEFRPTAAEFADPVSYILKIEPAAAPYGICKVVPPLPPPPKKATFSNLSRSFAALHPDDRSPSFPTRHQQVGLCPRRTRPGLKPVWRSSHRYTLPQFESKAGATRKSLLAGLNFPASRQLTPLDHEVLFWRASADRPIVVEYGSDMSGSGFSPCAAQPQPPPQQQPTARAAAHLGETAWNMRGVARSPGSLLRFMPEDVPGVTTPMLYVGMMFSWFAWHVEDHDLHSLNYMHLGAAKTWYGVPRDAALAFEDVVREHGYGGEVNPLETFATLGQKTTVMSPEVLVESGIPCCRLVQNAGEFVVTFPGSYHCGFSHGFNCGEASNIATPEWLRIAKEAAIRRASINRPPMVSHYQLLYDLALSMRFREPSNGEMETRSSRIKEKKKCEGEQLVKKMFIQNVIEDNELLSHLLNDGSSCIILPANAHDGPGLSTLRSTDQSNMNSRISHNLCSREEAPEASGCLSPNRNGDTRNCISSDTHNMEGDKGDIMSATGLLDQGLLSCVTCGILSFSCVAVLKPRDSTARYLMSADSNSINNQLSISGGSILADAPTNERNGVISRPYSEHCCNEIMADDAEIDKNSALDLLAFAHGGQPDPEEDPLEKILKIAHGINKSQPNSSNNVGCVGTKLSSSSTERQERPSSQNAHCNGSSVISNGPKGVRTRNKYQLKMVLSEGFQAKDIYSAKEKKVQSEPSSSKGDVKETIDVSGTENDVGCKSTTISVSEHRGSTKNMYSVKEKKVQSKPSSLKGTVKETVDVSGTENDARCKSITISVSEHRGSTPMTNSLAASIVKPDKDSSRMHVFCLEHAIEVEKQLHAIGGSNIMLICRPEYPKIEAEARLLGEEMGLVYDWKGIHFKEANMEDRQKIQEVLRDEEAIPTSSDWAVKLGINLYYSANLAKSPLYNKQMPYNRVIYRAFGCDSPNDSPVMFNTCERKQSHQKKIVVAGRWCGKVWMSKQVHPYLAHRVESQEAEEADRICSYHFDEKHKAEPVGNSSRVEASKRKSSSLTDVTESSNRRGEIPGEETNTKRPKHSQENNLRALETAAEVVVPSPAGTGLRVSSRIANRANKLKSKMEKEDVPSSRPKSNIKEKSSHASGQKSNVQEANANSASHLRAMPPKQKAEAEAKKQIRTPKPPKQAVEYSCDIEGCSMSFRTKRDLSLHKSDICPVKGCGKKFFSHKYLLQHRKVHTDDRPLTCPWKGCNMAFKWPWARTEHLRVHTGDRPYVCHEPGCAQTFRFVSDFSRHKRKTGHSVKKKKKAKS

SEQ ID NO: 139 - DNA, 2994 bp, Oryza sativa
atgccgcccaagaggaagcgcggtggcgggaggccgcgcaaggccccggaggacgccgccgccaaggaaaacggtgagaagacaaacaaggaggaggaaacgcaggcttctcctgaggagaatggcgcagggcagactcaggcctcgagaaccgcaagaaagcgcaggaagggtcctgttgctgatccctcttcgactgaacttccacccaggaagctcagggacaggcggaacgttccagcggtagactacaaggagaataagcacacaaaaaagatggatggaacttcaaccatgtgccatcagtgccaaaggaaggacagtggaagagttgtgaggtgccggaatggtgctgaaaaaaacaggaggcacagatattgtgtcaagtgcatcaaacgctggtacccgcatctaacagaggacgattttgagaactgctgtccagtttgtcacaataactgcaattgtaagacttgtctgcggacaaatgtaataaataagggtgacaaggagtttgccgatggtaagaacaaaattaaatactctctgcgtattgcacgctttttgctcccttggttgaaacaacttcaccaagagcagatgctagagaaaagtgttgaggccacaattaaagggatcgatgtaactgacttggaggttcctcaagctcagtttaataatgatgagcggatttactgtgataactgcagaacatccattgttgacttccacagaagttgtaaaagtggtcactatgatctctgcctcagctgctgccaggagttgcgtcaaggtcttactactggtactgttgtcacttgtgacacagctgttgatgtacctgaaatagaaggcaaggaaggtttgcaagagggaagtagtcatagcagtgctgtaggtcaaggggcttctgatcaacagaatgacaggttgataggtagtgcagctccttcagaggattgcactcctagtttgatatggagggcaaaaagcaacggaagcataccatgcccacctaatgcaggtggttgcggggattgtcttctcgaacttaggtgtttgtttaaggagaactttatttctgatttactggataaagtcaattcagtggtcaataaggaaacagagcaggagttgggaggctctagatgttcctgcttcactgaatccggtgaagtgaacaatgaaacatcacggaaatcagcttgcagagaggactccaatgataactacatatattgtccaactgctagagaagttcaaagtggagctttagatcattttcagcagcattggttgaatggtcagccagtcattgttcgtgacgtgcttgagctaacttctggactgagctgggagccaatggttatgtggcgggccttacgggaaaagagagacaagaaagagcatgaacggctctcagttatagctcttgattgtctgacatggtttgagtttatgtaccaccaggatgtgttggtggtgccagtttcatatctggggttcaacagcaccattgaaactactttatatttcaaactggttgatataaatattcacatgttttttgaggggtattcccgtggagctgttggttcggaggatttgcctgtgctacttaagcttaaagattggccacaacatagttcctttgaggagcgcctgccgcggcatggtgctgagttcatgtctgcactaccatttcgtgagtatacagatccaaaatctggtccccttaatctggcagtgaagcttccaaaacatgttaaaaagccagatcttggtccaaagacatacattgcttatggtgtcgcccaagagttgggaataggtgattctgttacgaagatccattgcgacatgtctgatgcggttaatattctcatgcatactgatgaggtagaactcaaagctgaaaggattacagcaatagagaaaaagaaagagagcttacgtaaagatggcaagaatcttcatgttctgcgaccagaccatgacgatgatacatcaatagctctcagtgaatcaactgaagtgccaagatctcgaggacttgaaaatggctcaagcattaagcagccagcaccaaatgttgctgtaatggaccagggaggtgttcatacagatatggtagctgatgaagctgagggaaacttgagtctgtctaatgggcaatcacccaatcaaagtgatgcacataatatggatattactttctccaagggggaaacagaccattctatctgcacaattaatgggggagaggagatgggcaatggctttgggagggaagataaatgtaaatcttctcatggtgtaggatcatctgaatcttctgattgtcaaagacgcagtaggcgacgtgatgcttgctcttccagtgcaacaggggaaataaacgaaaccagcatggagactaacaaatttaccatatctattgagcccaaagatgatcacccatttgttgagggaaatcagacagagggtggtgcattgtgggatatcttccgacgtgaagatgtcagcaaattgcatgattatctgatgaagcatgcagaagagtttagacattataattatgaaacagtcaaacaggtttctcatcctattcacgatcaatgcttttatctaacaaatgagcacaagagaaagctcaaggaagaacatggaattgagccttggacatttgaacagaaacttggtgaggctgtgtttatcccagcaggatgtccccaccaagtcagaaatttgaagtcatgtataaaggttgcacttgactttgtttctccggaaaatgtgcaagagtgcatcaggctgacagaagaatttcgcttgcttccgaagggtcatagggtgaatgaagataaactagaggttaagaagatagctctatatgcacttgatcaagccattgacgatatcacaggcaaaagttgcaatgaaaggacaaaggatgaaggggaagaggaggcgtctgccccaagtgttagttaa

SEQ ID NO: 140 - protein, 997 aa, Oryza sativa
MPPKRKRGGGRPRKAPEDAAAKENGEKTNKEEETQASPEENGAGQTQASRTARKRRKGPVADPSSTELPPRKLRDRRNVPAVDYKENKHTKKMDGTSTMCHQCQRKDSGRVVRCRNGAEKNRRHRYCVKCIKRWYPHLTEDDFENCCPVCHNNCNCKTCLRTNVINKGDKEFADGKNKIKYSLRIARFLLPWLKQLHQEQMLEKSVEATIKGIDVTDLEVPQAQFNNDERIYCDNCRTSIVDFHRSCKSGHYDLCLSCCQELRQGLTTGTVVTCDTAVDVPEIEGKEGLQEGSSHSSAVGQGASDQQNDRLIGSAAPSEDCTPSLIWRAKSNGSIPCPPNAGGCGDCLLELRCLFKENFISDLLDKVNSVVNKETEQELGGSRCSCFTESGEVNNETSRKSACREDSNDNYIYCPTAREVQSGALDHFQQHWLNGQPVIVRDVLELTSGLSWEPMVMWRALREKRDKKEHERLSVIALDCLTWFEFMYHQDVLVVPVSYLGFNSTIETTLYFKLVDINIHMFFEGYSRGAVGSEDLPVLLKLKDWPQHSSFEERLPRHGAEFMSALPFREYTDPKSGPLNLAVKLPKHVKKPDLGPKTYIAYGVAQELGIGDSVTKIHCDMSDAVNILMHTDEVELKAERITAIEKKKESLRKDGKNLHVLRPDHDDDTSIALSESTEVPRSRGLENGSSIKQPAPNVAVMDQGGVHTDMVADEAEGNLSLSNGQSPNQSDAHNMDITFSKGETDHSICTINGGEEMGNGFGREDKCKSSHGVGSSESSDCQRRSRRRDACSSSATGEINETSMETNKFTISIEPKDDHPFVEGNQTEGGALWDIFRREDVSKLHDYLMKHAEEFRHYNYETVKQVSHPIHDQCFYLTNEHKRKLKEEHGIEPWTFEQKLGEAVFIPAGCPHQVRNLKSCIKVALDFVSPENVQECIRLTEEFRLLPKGHRVNEDKLEVKKIALYALDQAIDDITGKSCNERTKDEGEEEASAPSVS

SEQ ID NO: 141 - DNA, 2988 bp, Oryza sativa
atggcggcggaggaggtggaggcggcggcgatcgacggatccggcgaggaggcgaagcggaagagtggtaagcagaggggatcgggcgccaaggggaggcgccggaacggcgaccgggctttccgcccgccggcgatgaggccggaggaagaagggcgcggtgttgcgacgaggcccggggcgctcagggaaaggaagccgccgcccaacgccttcaacgcgccagacgatgatgaggatgtcgagaaaactgatcaacttctcgagcctctcaacaagcccaaaagacgtgatgcagggaagaagagaggacccagaaaaaagaaagtggatcaagagaacatcaaaacccacaggcataacgcaaatgcagtaaaaggcaagatgttagtcaatgataaggtttcgaagactgaaaagaagcgtaagagaggagacacaggagcggcagaaaataatgggaaagggaagaaaatgttgacaggtgaaaacgccttaatgtgtcaccaatgccagagaaatgacaaagggagagtggtctggtgcaagacttgcaacaataagcgcttttgtgtgccatgcattaatcaatggtatcctgatttgcctgaaaatgaatttgctgcaaaatgcccttattgtcgcaagaattgtaattgcaaggcatgcctgcgaatgagaggtgtcgaagagcctccaagaaaggaaatttctaaagaaaatcagattcgttatgcctgtcatgtgttacgcttgttgcgtccttggctgatagaactgcgacaggagcagatggcagagaaggaattagaggctaagatacaaggtgtttcagttgatcaaataaaggtggaacaagctgtgtgtgatctagatgagcgtgtctattgcaatagatgcagcacttctatagttgattttcatagaagctgcaagcactgtttctatgacttgtgcttgacctgctgccaggagcttcgcaaaggtgagatccctggaggagaagaggtggaaattttggatcctgaagaaagagacaaggattatgcttttggtaagattctgtcagatggtgagaaccaaagggactctttgaagtgtcgcagcgacacccaaaacagtgagtcaaacaaaggcatggcttctgacgaaaaccaaaagaaggctctgttactttggaaagcaaacagtaatggtagcataccttgcccacgaaaggaaaaggaagactgcagtttttcatctctagatctgaaatgcttgtttccagagaagttgctccctgaattagaagatagatctgagaaggtcttctggagtgaaacatttgcaaaagaactaggtagaacaagtgagctgtgcccttgttttgatcactcaggcaagataagaagtgacagcaagaaattacgtcaggctgcaaatagggaggactcgagtgataactacttatactgtccggtggccactgatatccaggacgctgacctgttgcactttcagatgcattgggcaaagggcgaaccagttgttgtttcagacactcttaagctaacttctggtcttagctgggagccgatggttatgtggcgggcagtacgagaacgaaccaaagggaaggcagaagatgagcagtttgctgtgagggcagtagattgcctcgactggtgtgaggtggaaattaacatacacatgttttttatgggatatacaaggggcagaactcatcccaggacctactggcctgagatgcttaagctaaaggactggcccccttctagctcatttgatcagcgattgcctcgccatggtgctgaatttatcagtgcattgccatttccggagtatactgatccacgatatggtccgctaaatcttgcagtgaagcttcctggtggtgtcctgaagccagatcttgggccaaaaacttacattgcctatggattttctgaagagttgggcaggggtgactctgtaaccaaacttcactgtgacatgtctgatgcagtaaacatcttaacacacacagcggaagtgccctgtgagacttatgatgctgttcagattaaaaacacgcagaaaaagatgaaaatgcaagatgacatggaaatatatgggatgatagaatcaggcagtgaactcaagccatcagcatgcccagttgaattggggaacaaagctgttggtgaagcaccaaaggcctcatgcagcaaagaaaatgttcataccttgaaagacaagtctaatggtttggatataaacgcttcaccacctgatgatgctggaggtgatgccagggatgaagcattgtcctatgaatctgtggtacatagtgatgtagctcagtgtccaaaccataaccatgagaccaataattctgatgatgcacgtattggagctcagagatgtcaaaagaaagctaaaggtcgtcctccgaagacaggttcaggggtatcagagcaccaggaaagtggtggtgctttgtgggatattttccgaagagaggactctgagaaattacaagacttccttaggaagcatgcgccagaatttcggcacatccactgcaatccagtgaaacaggttattcatccaattcatgatcaagctttctatttaactgcggagcataaaagaaagctgaaggaagaatatggtgttgaaccttggacctttgaacaaaagcttggcgaagcagttttgattcctgccggatgtcctcaccaagtcaggaatttgaagtcctgcatcaaggttgcactggactttgtttcccccgagaatgttggtgagtgtgttaggctgaccaaggaatttagacgacttccatcttcccacagggctaaagaagataagctagagatcaagaagatggctttccatgctctgaatgaagttctaaactttctggatcctccttcctcagaagggtcgaaagaagcggcggagaagcctcgaagggggcgtggtcgcccaagaaaacactag

SEQ ID NO: 142 - protein, 995 aa, Oryza sativa
MAAEEVEAAAIDGSGEEAKRKSGKQRGSGAKGRRRNGDRAFRPPAMRPEEEGRGVATRPGALRERKPPPNAFNAPDDDEDVEKTDQLLEPLNKPKRRDAGKKRGPRKKKVDQENIKTHRHNANAVKGKMLVNDKVSKTEKKRKRGDTGAAENNGKGKKMLTGENALMCHQCQRNDKGRVVWCKTCNNKRFCVPCINQWYPDLPENEFAAKCPYCRKNCNCKACLRMRGVEEPPRKEISKENQIRYACHVLRLLRPWLIELRQEQMAEKELEAKIQGVSVDQIKVEQAVCDLDERVYCNRCSTSIVDFHRSCKHCFYDLCLTCCQELRKGEIPGGEEVEILDPEERDKDYAFGKILSDGENQRDSLKCRSDTQNSESNKGMASDENQKKALLLWKANSNGSIPCPRKEKEDCSFSSLDLKCLFPEKLLPELEDRSEKVFWSETFAKELGRTSELCPCFDHSGKIRSDSKKLRQAANREDSSDNYLYCPVATDIQDADLLHFQMHWAKGEPVVVSDTLKLTSGLSWEPMVMWRAVRERTKGKAEDEQFAVRAVDCLDWCEVEINIHMFFMGYTRGRTHPRTYWPEMLKLKDWPPSSSFDQRLPRHGAEFISALPFPEYTDPRYGPLNLAVKLPGGVLKPDLGPKTYIAYGFSEELGRGDSVTKLHCDMSDAVNILTHTAEVPCETYDAVQIKNTQKKMKMQDDMEIYGMIESGSELKPSACPVELGNKAVGEAPKASCSKENVHTLKDKSNGLDINASPPDDAGGDARDEALSYESVVHSDVAQCPNHNHETNNSDDARIGAQRCQKKAKGRPPKTGSGVSEHQESGGALWDIFRREDSEKLQDFLRKHAPEFRHIHCNPVKQVIHPIHDQAFYLTAEHKRKLKEEYGVEPWTFEQKLGEAVLIPAGCPHQVRNLKSCIKVALDFVSPENVGECVRLTKEFRRLPSSHRAKEDKLEIKKMAFHALNEVLNFLDPPSSEGSKEAAEKPRRGRGRPRKH

SEQ ID NO: 143 - DNA, 2607 bp, Oryza sativa
atgttagtcaatgataaggtttcgaagactgaaaagaagcgtaagagaggagacacaggagcggcagaaaataatgggaaagggaagaaaatgttgacaggtgaaaacgccttaatgtgtcaccaatgccagagaaatgacaaagggagagtggtctggtgcaagacttgcaacaataagcgcttttgtgtgccatgcattaatcaatggtatcctgatttgcctgaaaatgaatttgctgcaaaatgcccttattgtcgcaagaattgtaattgcaaggcatgcctgcgaatgagaggtgtcgaagagcagcctccaagaaaggaaatttctaaagaaaatcagattcgttatgcctgtcatgtgttacgcttgttgcgtccttggctgatagaactgcgacaggagcagatggcagagaaggaattagaggctaagatacaaggtgtttcagttgatcaaataaaggtggaacaagctgtgtgtgatctagatgagcgtgtctattgcaatagatgcagcacttctatagttgattttcatagaagctgcaagcactgtttctatgacttgtgcttgacctgctgccaggagcttcgcaaaggtgagatccctggaggagaagaggtggaaattttggatcctgaagaaagagacaaggattatgcttttggtaagattctgtcagatggtgagaaccaaagggactctttgaagtgtcgcagcgacacccaaaacagtgagtcaaacaaaggcatggcttctgacgaaaaccaaaagaaggctctgttactttggaaagcaaacagtaatggtagcataccttgcccacgaaaggaaaaggaagactgcagtttttcatctctagatctgaaatgcttgtttccagagaagttgctccctgaattagaagatagatctgagaaggtcttctggagtgaaacatttgcaaaagaactaggtagaacaagtgagctgtgcccttgttttgatcactcaggcaagataagaagtgacagcaagaaattacgtcaggctgcaaatagggaggactcgagtgataactacttatactgtccggtggccactgatatccaggacgctgacctgttgcactttcagatgcattgggcaaagggcgaaccagttgttgtttcagacactcttaagctaacttctggtcttagctgggagccgatggttatgtggcgggcagtacgagaacgaaccaaagggaaggcagaagatgagcagtttgctgtgagggcagtagattgcctcgactggtgtgaggtggaaattaacatacacatgttttttatgggatatacaaggggcagaactcatcccaggacctactggcctgagatgcttaagctaaaggactggcccccttctagctcatttgatcagcgattgcctcgccatggtgctgaatttatcagtgcattgccatttccggagtatactgatccacgatatggtccgctaaatcttgcagtgaagcttcctggtggtgtcctgaagccagatcttgggccaaaaacttacattgcctatggattttctgaagagttgggcaggggtgactctgtaaccaaacttcactgtgacatgtctgatgcagtaaacatcttaacacacacagcggaagtgccctgtgagacttatgatgctgttcagattaaaaacacgcagaaaaagatgaaaatgcaagatgacatggaaatatatgggatgatagaatcaggcagtgaactcaagccatcagcatgcccagttgaattggggaacaaagctgttggtgaagcaccaaaggcctcatgcagcaaagaaaatgttcataccttgaaagacaagtctaatggtttggatataaacgcttcaccacctgatgatgctggaggtgatgccagggatgaagcattgtcctatgaatctgtggtacatagtgatgtagctcagtgtccaaaccataaccatgagaccaataattctgatgatgcacgtattggagctcagagatgtcaaaagaaagctaaaggtcgtcctccgaagacaggttcaggggtatcagagcaccaggaaagtggtggtgctttgtgggatattttccgaagagaggactctgagaaattacaagacttccttaggaagcatgcgccagaatttcggcacatccactgcaatccagtgaaacaggttattcatccaattcatgatcaagctttctatttaactgcggagcataaaagaaagctgaaggaagaatatggtgttgaaccttggacctttgaacaaaagcttggcgaagcagttttgattcctgccggatgtcctcaccaagtcaggaatttgaagtcctgcatcaaggttgcactggactttgtttcccccgagaatgttggtgagtgtgttaggctgaccaaggaatttagacgacttccatcttcccacagggctaaagaagataagctagagatcaagaagatggctttccatgctctgaatgaagttctaaactttctggatcctccttcctcagaagggtcgaaagaagcggcggagaagcctcgaagggggcgtggtcgcccaagaaaacactag

SEQ ID NO: 144 - protein, 868 aa, Oryza sativa
MLVNDKVSKTEKKRKRGDTGAAENNGKGKKMLTGENALMCHQCQRNDKGRVVWCKTCNNKRFCVPCINQWYPDLPENEFAAKCPYCRKNCNCKACLRMRGVEEQPPRKEISKENQIRYACHVLRLLRPWLIELRQEQMAEKELEAKIQGVSVDQIKVEQAVCDLDERVYCNRCSTSIVDFHRSCKHCFYDLCLTCCQELRKGEIPGGEEVEILDPEERDKDYAFGKILSDGENQRDSLKCRSDTQNSESNKGMASDENQKKALLLWKANSNGSIPCPRKEKEDCSFSSLDLKCLFPEKLLPELEDRSEKVFWSETFAKELGRTSELCPCFDHSGKIRSDSKKLRQAANREDSSDNYLYCPVATDIQDADLLHFQMHWAKGEPVVVSDTLKLTSGLSWEPMVMWRAVRERTKGKAEDEQFAVRAVDCLDWCEVEINIHMFFMGYTRGRTHPRTYWPEMLKLKDWPPSSSFDQRLPRHGAEFISALPFPEYTDPRYGPLNLAVKLPGGVLKPDLGPKTYIAYGFSEELGRGDSVTKLHCDMSDAVNILTHTAEVPCETYDAVQIKNTQKKMKMQDDMEIYGMIESGSELKPSACPVELGNKAVGEAPKASCSKENVHTLKDKSNGLDINASPPDDAGGDARDEALSYESVVHSDVAQCPNHNHETNNSDDARIGAQRCQKKAKGRPPKTGSGVSEHQESGGALWDIFRREDSEKLQDFLRKHAPEFRHIHCNPVKQVIHPIHDQAFYLTAEHKRKLKEEYGVEPWTFEQKLGEAVLIPAGCPHQVRNLKSCIKVALDFVSPENVGECVRLTKEFRRLPSSHRAKEDKLEIKKMAFHALNEVLNFLDPPSSEGSKEAAEKPRRGRGRPRKH

SEQ ID NO: 145 - DNA, 1062 bp, Oryza sativa
atgccgccccagcctccgccggcggcgtcggcgtcggccagtgccccggatcccgccgtcccggcttggctcagggggctcccccgcgcgcccgagtaccgcccgacggagtccgagttcgccgaccccatcgccttcctctcccgcgtggagcgcgaggccgccgcctacggcatctgcaaggtcatcccgccccacccgcgcccttcccgccgcttcgtcttcgcccacctcaaccgctccctcgtctcctcctgcgacgcccccgcgccctctcccgccgccgcctccgactcgtccattcctccatcctcctcctcgccgccgccggtctccgccgcggtgttcacgacacggcaccaggagctcggcaacccgcggcgtggacgcccgacgccgcaggtgcttaagcaggtgtggcagagtggggagcggtacacgctcgaccagtttgagtccaagtcccgcgccttctcaaagacgcacctcgctggactccacgaaccgactgcgctcgcggtggaatcactcttctggaaggcgtcggcggaccgtcctatctatattgagtacgccaatgatgtccctggctctgggtttgctgcacccgtgcagttgcaacgcaagaagaagcagaaaagagagactgccccgatggacgaatgggagaagagttcaggctggaggctgtcaaatagcccatggaacctgcaagcaattgcgcgggctcctggttcgctcacacggtttatgcctgacgatgttcctggggtgacttctccaatggtttacattggcatgctgttcagctggtttgcgtggcatgtggaggatcatgatctgcatagtctcaacttcctccacactggcgcacctaagacgtggtatgcggttcctggtgatagggctgttgagcttgaggaagttatccgtgtacatggctatggaggcaacactgatcggatcgcgtcactagcagtgcttggtgagaaaacaacactaatgtccccagaggtccttatagacaatgattggtgcaatatcctggtgagtttgtggtga

SEQ ID NO: 146 - protein, 353 aa, Oryza sativa
MPPQPPPAASASASAPDPAVPAWLRGLPRAPEYRPTESEFADPIAFLSRVEREAAAYGICKVIPPHPRPSRRFVFAHLNRSLVSSCDAPAPSPAAASDSSIPPSSSSPPPVSAAVFTTRHQELGNPRRGRPTPQVLKQVWQSGERYTLDQFESKSRAFSKTHLAGLHEPTALAVESLFWKASADRPIYIEYANDVPGSGFAAPVQLQRKKKQKRETAPMDEWEKSSGWRLSNSPWNLQAIARAPGSLTRFMPDDVPGVTSPMVYIGMLFSWFAWHVEDHDLHSLNFLHTGAPKTWYAVPGDRAVELEEVIRVHGYGGNTDRIASLAVLGEKTTLMSPEVLIDNDWCNILVSLW

SEQ ID NO: 147 - DNA, 2784 bp, Oryza sativa
atggaggcggcggcggcggcggccgccgtgccggaggagctgcggtgcaagcgctccgacggcaagcagtggcgatgcagcgcgccctccatgcccgacaagaccgtctgcgagaagcactacgtccaggccaagaagcgcgccgcctcctccgcgctccgggcctccctccgcaggtcctccgcctccgcctccgccgcgcggggcacgaccccgcctgcgcggatggcggtcgcgaggcccatctacggcagggtcgcgggggagccggtgtacgtggcggagccggcgctgccgccgccgccgccgccgccacggaggaggcagccggtccacgggctgcccatgggcaatgctgccggcgcgcgcaccgcggcggagctggtcgggaggggctcggcggggctggttgcctgcagctcggcggcgggggcggcagcggccgcaacctgccatcagtgccggagggtcgctaataccatttgttgtacaagctgcgacagaagggggtactgcaccaactgcatctcgagatggtactctgatatcccaattgatgatgttcgaaaggtttgtccagcatgtcgtggcatttgtaactgcagagtttgcttactaggagataatgtaataaaggcaagggttcaggagatatctgctgtagataagttggaatatcttcatagcattctggcatctgtccttccagtattaaagcagatttattctgatcaatgtttcgaaattggtgttgatacaaaagcttatggacttaggacagatataatcagggcgaaggtcaatcctgatgagcaaatgtgctgtgacttctgcaaagtgccagtatttgattatcaccgacactgcccaaggtgtttgtatgacttatgtcttgactgttgtcgagacataaggcgatctaggaccagtgttgcaagaggagaatatgctgaaggtcgtgtggtagatagaagtaaagatacttcgaataaaagagcaagaatggaaccatctgcagaaagtgcaaatgataagtcagtcccacaacgaagggacataaaaaatattgacattagatctttattccctacatggagagtcaataatgatggaagcattacttgtgggcctcatgaggctggtggttgtggctcctcgaagttagtgttaaggcgaatattcaaaataaactggattagtaagcttgtaaaaaattctgaggaaatggtcaatggttgtaaagtacatgttcttgagaatggatgctcatcctgcaatgatggcagaacattagagttaactggtcatcgtaactttggtgtctcaacatgttcaaataatggtggtattgatcggttctgtgtgttctctcctgtattagaggacttgaaatctgaaggtattattcattttcgtaaacactggataaaaggagaacctgtagttatcaggaatgcgtttgagccttctctgtcatcaagctgggacccactaaatatttggcgaggaatccaggaaatcatggatgaagaagtggatgacgatgtcattgtcaaagctgtggattgctcaaaccaagcagaggtggatattgagctgaaacagtttatcaaaggttattcagatggtcacaagggggaagatggggaattgatgatgctgaaattgaaagagtggcccccacccagtgtattggaggagtttctgctatgccaaagaccagaatttattgtcaattttccattagttgattttatacattccaggtgggggctcctaaatctttctgctaaattgcccccagacaccctacaacctgaagttggcttgaagctgttaattgcatatggaagacatcaagaagctggtaaaggtgattcagtgacaaatctaatgattaacatggctgatgtggtgcatatgctaatgcatacagccaaagggcatgacgtatgtccaaagaggctacaacctgagcgatctgaaaagattgccaatggaatgacaatgcatgtaaatgctcatgcacctgttcaaaatttgaatgtggatatgggggaacaatcacctgaccatgtaagctcaaagtttgatgaaagagcgcatgcgtctgccttgcgattacaagagaagtcttcagatgccaaacttaattgtggtttcgaaggctcttcaactgagttatcttgctcgtcacattcagaggaaccaaaagttaatggttcagaaagaagtcaggctggttctgtttgggatgtgttccgcaggcaggatatttcaaagctgaatgaatatttaactgctaactgggaagaactggcagctagtagtcaggttaagaatcctatttatgaacaatctatatatctcaacaagtatcataaaaggatactgaaggatcaatatggaattgaaccctggacattccaacaacatatcggtgaggctgtatttgttcctgctggctgcccattccaagtgaaaaatctccagtctacggttcaattggctcttgatttcctgtcaccggaaagtttgggggagtcggcccgaatggcccaggagattcgctgcctaccaaatgatcatgatgcaaaactgaagatgctcgagattggaaaaatctctttatatgcagctagttctgctgtcagagaaattcagagaataaccctcgatcccaagtttaatctagaccttaaattcgaggatcagaatctaactcaggcggtttctgagaacttggctagagtcaccaaacaacggaatgtaccatgcagctga

SEQ ID NO: 148 - protein, 927 aa, Oryza sativa
MEAAAAAAAVPEELRCKRSDGKQWRCSAPSMPDKTVCEKHYVQAKKRAASSALRASLRRSSASASAARGTTPPARMAVARPIYGRVAGEPVYVAEPALPPPPPPPRRRQPVHGLPMGNAAGARTAAELVGRGSAGLVACSSAAGAAAAATCHQCRRVANTICCTSCDRRGYCTNCISRWYSDIPIDDVRKVCPACRGICNCRVCLLGDNVIKARVQEISAVDKLEYLHSILASVLPVLKQIYSDQCFEIGVDTKAYGLRTDIIRAKVNPDEQMCCDFCKVPVFDYHRHCPRCLYDLCLDCCRDIRRSRTSVARGEYAEGRVVDRSKDTSNKRARMEPSAESANDKSVPQRRDIKNIDIRSLFPTWRVNNDGSITCGPHEAGGCGSSKLVLRRIFKINWISKLVKNSEEMVNGCKVHVLENGCSSCNDGRTLELTGHRNFGVSTCSNNGGIDRFCVFSPVLEDLKSEGIIHFRKHWIKGEPVVIRNAFEPSLSSSWDPLNIWRGIQEIMDEEVDDDVIVKAVDCSNQAEVDIELKQFIKGYSDGHKGEDGELMMLKLKEWPPPSVLEEFLLCQRPEFIVNFPLVDFIHSRWGLLNLSAKLPPDTLQPEVGLKLLIAYGRHQEAGKGDSVTNLMINMADVVHMLMHTAKGHDVCPKRLQPERSEKIANGMTMHVNAHAPVQNLNVDMGEQSPDHVSSKFDERAHASALRLQEKSSDAKLNCGFEGSSTELSCSSHSEEPKVNGSERSQAGSVWDVFRRQDISKLNEYLTANWEELAASSQVKNPIYEQSIYLNKYHKRILKDQYGIEPWTFQQHIGEAVFVPAGCPFQVKNLQSTVQLALDFLSPESLGESARMAQEIRCLPNDHDAKLKMLEIGKISLYAASSAVREIQRITLDPKFNLDLKFEDQNLTQAVSENLARVTKQRNVPCS

SEQ ID NO: 149 - DNA, 2862 bp, Oryza sativa
atggcggcggggaacggccggatggaggcggcgctgggctgcctcgcggcgctccccgacgaggtgctctgcgccgtcgtcgacctcctcccgcccaccgacgtcggccgcctcgcctgcgtcagcagtgtcatgtacatactttgcaatgaggagcctctctggatgagcaagtgtctttcagttgggggtcttcttgtgtatagaggttcttggaagaaaacagcattgtctagacttaatctttgttcagaaaatgatgagatttaccagaagcctcgccattttgatgggttcaattccatgcacttatacaggagatggtacagatgttttactaatttgagtagcttttcctttgataatgggcacgttgaaaggaaagatgacctttctctagaccaatttcgcgctcagtatgatggaaaatgtccagttttgcttactaaactggctgaaacctggccagcaaggactaaatggacagcgcagcaactgacacatgattatggtgaagttccctttaggatatctcagagaagccctcaaaagataaaaatgaaactaaaagattatgttttttacatggaactccagcatgacgaagatccactttacatatttgatgataagtttggagaatcagcacctacactattggaagattacagtgtccctcatctatttcaagaagatttctttgaaatcatggattacgaccaacgaccagctttcagatggcttattattggaccagagagatcaggtgcttcttggcatgttgatccagggttgaccagtgcctggaatactcttctttgtggccgaaaaaggtgggcaatgtaccctcctggaagagtaccaggtggtgtcacagtacatgtcagtgatgaagatggtgatgttgacattgaaactcctacatctttgcagtggtggctagatatctacccaaatcttgctgagcatgagaaaccactggaatgcacacaattaccaggagagaccatatttgttcctagtgggtggtggcattgtgttttgaaccttgacatgacaattgctgtcacgcaaaattttgtcaaccaatcaaattttaagcatgtatgtttggacatggcacctggttactgtcacaaaggagtttgccgtgctggcttacttgctgctccagacaaatctattagagatattgaaaatcttcctagtataacgagtagattgaaccactctgacatggcctgtaaggaaaaaagactgaaaagttcagagcctataagaacttcaaataatgcaaatcagtgttctgcatttgagttctcagatgttcatgaaaacttgggggaccaagttttttcgtatgatatagatttcttatcccaattccttgagaaagaaaaggatcactattcttctgtctggagccctactaattcaattggccagagagaagcaagagaatggctacgtaggctatgggttcttaaacctgaattgagagaactaatatggaagggtgcatgtctagcaattaatgtagacaagtggtattcatgcttagaggaaataagtgcatgccatagtttaccaccaccttctgaagatgagaagcttcctgttggcacaggtagcaacccagtcttcattgtttctggcaatgtgatcaaaatttatgctgaaggagggttgggttattctatacatggtttgggcacagagcttgagttctatgatcttctgcaaaaacttggctcgccattgatcaaccatgtccctgagatcattgcaagtggctttcttgtgtacctggatggtgtctacaagacagttccatgggatggaaacggaataccagatgttctagctaaatactactctttggaggtgtcttatgcaaacggctcttttcctcttggattatggagcaagcaactgtttggattgagtaattcaactgatgctccagacagaccaatttgtccttacatggttaccagaaaatgcaaaggggatatttttgctcgcatacgtgataaattgaccaagactgatgttttgaatcttgcatcatccttgggagttcaaatgcgaaatattcatcaattaccccttccacatgtggaacacatatccaaatctgggaacgaagatatcaaagcaaaggaaaattcaatttctgatgtcactcatgttccgcctgaatggaaacaagtagtttctactctagacaggagaaagaaaagtataaagaagcatctaagtaactggggtggttcaattccacaggttctaattgagaaggctgaagaatatctccctgacgacatccgctttcttatcaagtttgttaaggacgatgatggtgattcagtctatgtggtaccttcttggatacattcagatataatggatgataacattctcattgaggggaccacagaaccaggaacttccactgattgcattgccgttgaagatctgaacaaaatggatgcaattcatatcattgatttcagtgatctgtccattggggatcctctatgtgacttaattccactgcacttggatgtattccgtggtgatattgatcttctcaggcagtttttacgaagctatcagcttccttttctgagagcagaatcaaataaagatatatacaagtcaatacaaaattctaaattcagcagggcatcgtatcgtgcgatgtgctactgcatacttcacgaggacaacgtcctgggagccatatttagcctgtggaaggatctgggcaccgcgacgtcatgggaagatgttgaacacttggtttggggagagctgaatcaataccagcagtcatgcagcgtgggcgaaattaactga

SEQ ID NO: 150 - protein, 953 aa, Oryza sativa
MAAGNGRMEAALGCLAALPDEVLCAVVDLLPPTDVGRLACVSSVMYILCNEEPLWMSKCLSVGGLLVYRGSWKKTALSRLNLCSENDEIYQKPRHFDGFNSMHLYRRWYRCFTNLSSFSFDNGHVERKDDLSLDQFRAQYDGKCPVLLTKLAETWPARTKWTAQQLTHDYGEVPFRISQRSPQKIKMKLKDYVFYMELQHDEDPLYIFDDKFGESAPTLLEDYSVPHLFQEDFFEIMDYDQRPAFRWLIIGPERSGASWHVDPGLTSAWNTLLCGRKRWAMYPPGRVPGGVTVHVSDEDGDVDIETPTSLQWWLDIYPNLAEHEKPLECTQLPGETIFVPSGWWHCVLNLDMTIAVTQNFVNQSNFKHVCLDMAPGYCHKGVCRAGLLAAPDKSIRDIENLPSITSRLNHSDMACKEKRLKSSEPIRTSNNANQCSAFEFSDVHENLGDQVFSYDIDFLSQFLEKEKDHYSSVWSPTNSIGQREAREWLRRLWVLKPELRELIWKGACLAINVDKWYSCLEEISACHSLPPPSEDEKLPVGTGSNPVFIVSGNVIKIYAEGGLGYSIHGLGTELEFYDLLQKLGSPLINHVPEIIASGFLVYLDGVYKTVPWDGNGIPDVLAKYYSLEVSYANGSFPLGLWSKQLFGLSNSTDAPDRPICPYMVTRKCKGDIFARIRDKLTKTDVLNLASSLGVQMRNIHQLPLPHVEHISKSGNEDIKAKENSISDVTHVPPEWKQVVSTLDRRKKSIKKHLSNWGGSIPQVLIEKAEEYLPDDIRFLIKFVKDDDGDSVYVVPSWIHSDIMDDNILIEGTTEPGTSTDCIAVEDLNKMDAIHIIDFSDLSIGDPLCDLIPLHLDVFRGDIDLLRQFLRSYQLPFLRAESNKDIYKSIQNSKFSRASYRAMCYCILHEDNVLGAIFSLWKDLGTATSWEDVEHLVWGELNQYQQSCSVGEIN

SEQ ID NO: 151 - DNA, 3171 bp, Oryza sativa
atggagatggaggaggcggtagacggcaagcacccgaagcgtgggaggggcaggccgaggggacgacggggcaggggcaggggcagggggaggggcggccgctccctcgcgtcgccggcggcggggcccggagaccaagggccgcggcggcggcgcggggtcgtcccggcggcggcggcggcggcggggggaagggcgctgagggagaggaggccggcgcctggtgcctaccgcgagagcggagctgataatgacgatgatggcggcggcgacgatgagcacgacgagcagaatgatgatggtgctgaaaaatcggataatcaagttgtggattctcttaatgaacccaacagaagtaatacagggaagaagcggggaagaccaaagaaagtgaaagcagagcaggaggacagtaaccaactctccaacgggaaacaccttggcgaaaacaatgggaatgatgaagcgataatgatgaagccttcaaaagaatcgaagaaaagaggtgcaggaaagaaacaagaggaagaagagaataataccatatccattgaggatgaaatgtgtgatgcgaacaataagaaggggaagaagatgctcactggggaaaatgctttgatgtgccaccagtgtcaaagaaatgacaaagggagggtgatttggtgtaaatcatgcaacaataagcgcttctgtgagccatgcatgaaacgatggtacccaggtttgtcagaagttgattttgctgcaaaatgcccatattgtagaaagaactgtaattgcaaggcatgcctaagaatgataggagttgaaaagccccctgaaaagaagatttctgaggaaaatcaacgacgttatgcttttcgtattgtagacttgttgcttccttggttgaaagaacttcaacaggagcagatgaaggagaaggaattagagggtagattacaaggtgtttctatggatgaagtaaagttggaacaagctgattgtgatatggatgagcgtgtttattgtgataggtgcaaaacttcgatagttgattttcatagaagctgcaaggcttgttcgtatgacttgtgccttgcatgctgctgggagcttcgcaaaggtgagattccaggaggagaagaggcaaagagtgtgcagtgggaagagagaggtcagaagtatgtttttggtaatatttccaaggatgagaagaaaagggtatcttcgaagaggcacatggagacccccagtactgaaacttgcaatgacatggctgttgctggggacccaaataaccctttgttactgtggaaagctaatagtgatggcagtataccttgtccaccaaaggaaatagggggctgcggtgcttcatctttggtactcagatgcttattaccagaaattatgctttctgagttagaacacagggctaacaaagttattaagagagaagcatttgataaagcaataaacgaaacaagtgatcagtgcccttgcttttatcacacaagcaagataagaacaaatgctactcgagaggcagcaaacagaaagggctcaagtgataactacttgtactgtccagatgccaataatatccaggaggatgacctgtcgcactttcagatgcattggtcaaaaggtgaaccggttattgtttctgatgctcttcggttaacatctggtctgagctgggagccattggttatgtggcgggcattgcgagagaagaaaaccaatggtgatgttgaagatgagcactttgctgttaaggcagtggattgccttgattggaatgaggtggaaattaacatacacatgttctttatggggtatatgagaggtagaagacatccgatgaccttttggcctgagatgcttaagctaaaagattggccaccatctagtatgtttgaccagaggttacctcgccatggtgctgagtttataactgcattgccatttcccgagtatactgatccacgatatggcccgctaaatcttgctgtcaggcttcctgctggtgtactgaagcctgatcttgggccaaaaacttatattgcttatggatgttatgaagagttaggcaggggtgactctgtgaccaagcttcattgcgacatgtctgatgcggtaaatatcttgatgcacacagctgaagtgtcctatgacactgaacagcttgacaagatagcaaaaattaaaatgaaaatgagagaacaagatcttcatgaactgtttggggtttcagaatcaggcgccaagggtaaagctgatgatgaagcatcgaaaatctcatgtaacatggaaaacaaacacacctctaaccaaagtactaagggtttggacattaatgctttaccacctgatgattctggaagtgatattggggataaaccatcattttgtcaatctgaggtagaaagtgaattaacacaatgttcaaaacacaatcacgaggttaatagttctgtcaagatgcatgctggagctcattgtacttcagacaaccaaggatacattgacaggagtggattcaaacgcaaagattcagactgttcagaccaacagaaaactggtggcgctttgtgggatattttccgaagagaagattctgagaagttacaagattatcttcggaagcatgcctcagaatttcggcacatacactgcaatccagtgaaaaatgtttctcacccaattcatgaccagactttctatttaactgtggagcataagagaaagctcaaggaagaacacggtgttgaaccatggacattcgagcagaagctaggcgatgcagttttcattcctgctggatgtccacaccaagtgagaaatttaaagtcttgcatcaaggttgctctagactttgtttcccctgaaaatgttggtgagtgtgttaagctgaccggagagtttagacgtcttccatctgatcacagggctaaagaagataaactagagattaagaagattgctctcaatgctcttaaagaagtcgtaaatttcttagatcctttaccaaaagggtcaaagaacagggatgaagtggtagaagtgaccaaaccaaaaaggaaatacggtaaccgaagaggtgacctgaagagtggggaagaccaacccattgatgaatccatagaagaaaggaagcctaaaaagcgagggagatctaaacggtga

SEQ ID NO: 152 - protein, 1056 aa, Oryza sativa
MEMEEAVDGKHPKRGRGRPRGRRGRGRGRGRGGRSLASPAAGPGDQGPRRRRGVVPAAAAAAGGRALRERRPAPGAYRESGADNDDDGGGDDEHDEQNDDGAEKSDNQVVDSLNEPNRSNTGKKRGRPKKVKAEQEDSNQLSNGKHLGENNGNDEAIMMKPSKESKKRGAGKKQEEEENNTISIEDEMCDANNKKGKKMLTGENALMCHQCQRNDKGRVIWCKSCNNKRFCEPCMKRWYPGLSEVDFAAKCPYCRKNCNCKACLRMIGVEKPPEKKISEENQRRYAFRIVDLLLPWLKELQQEQMKEKELEGRLQGVSMDEVKLEQADCDMDERVYCDRCKTSIVDFHRSCKACSYDLCLACCWELRKGEIPGGEEAKSVQWEERGQKYVFGNISKDEKKRVSSKRHMETPSTETCNDMAVAGDPNNPLLLWKANSDGSIPCPPKEIGGCGASSLVLRCLLPEIMLSELEHRANKVIKREAFDKAINETSDQCPCFYHTSKIRTNATREAANRKGSSDNYLYCPDANNIQEDDLSHFQMHWSKGEPVIVSDALRLTSGLSWEPLVMWRALREKKTNGDVEDEHFAVKAVDCLDWNEVEINIHMFFMGYMRGRRHPMTFWPEMLKLKDWPPSSMFDQRLPRHGAEFITALPFPEYTDPRYGPLNLAVRLPAGVLKPDLGPKTYIAYGCYEELGRGDSVTKLHCDMSDAVNILMHTAEVSYDTEQLDKIAKIKMKMREQDLHELFGVSESGAKGKADDEASKISCNMENKHTSNQSTKGLDINALPPDDSGSDIGDKPSFCQSEVESELTQCSKHNHEVNSSVKMHAGAHCTSDNQGYIDRSGFKRKDSDCSDQQKTGGALWDIFRREDSEKLQDYLRKHASEFRHIHCNPVKNVSHPIHDQTFYLTVEHKRKLKEEHGVEPWTFEQKLGDAVFIPAGCPHQVRNLKSCIKVALDFVSPENVGECVKLTGEFRRLPSDHRAKEDKLEIKKIALNALKEVVNFLDPLPKGSKNRDEVVEVTKPKRKYGNRRGDLKSGEDQPIDESIEERKPKKRGRSKR

SEQ ID NO: 153 - DNA, 3159 bp, Oryza sativa
atggagatggaggaggcggtagacggcaagcacccgaagcgtgggaggggcaggccgaggggacgacggggcaggggcaggggcagggggaggggcggccgctccctcgcgtcgccggcggcggggcccggagaccaagggccgcggcggcggcgcggggtcgtcccggcggcggcggcggcggcggggggaagggcgctgagggagaggaggccggcgcctggtgcctaccgcgagagcggagctgataatgacgatgatggcggcggcgacgatgagcacgacgagcagaatgatgatggtgctgaaaaatcggataatcaagttgtggattctcttaatgaacccaacagaagtaatacagggaagaagcggggaagaccaaagaaagtgaaagcagagcaggaggacagtaaccaactctccaacgggaaacaccttggcgaaaacaatgggaatgatgaagcgataatgatgaagccttcaaaagaatcgaagaaaagaggtgcaggaaagaaacaagaggaagaagagaataataccatatccattgaggatgaaatgtgtgatgcgaacaataagaaggggaagaagatgctcactggggaaaatgctttgatgtgccaccagtgtcaaagaaatgacaaagggagggtgatttggtgtaaatcatgcaacaataagcgcttctgtgagccatgcatgaaacgatggtacccaggtttgtcagaagttgattttgctgcaaaatgcccatattgtagaaagaactgtaattgcaaggcatgcctaagaatgataggagttgaaaagccccctgaaaagaagatttctgaggaaaatcaacgacgttatgcttttcgtattgtagacttgttgcttccttggttgaaagaacttcaacaggagcagatgaaggagaaggaattagagggtagattacaaggtgtttctatggatgaagtaaagttggaacaagctgattgtgatatggatgagcgtgtttattgtgataggtgcaaaacttcgatagttgattttcatagaagctgcaaggcttgttcgtatgacttgtgccttgcatgctgctgggagcttcgcaaaggtgagattccaggaggagaagaggcaaagagtgtgcagtgggaagagagaggtcagaagtatgtttttggtaatatttccaaggatgagaagaaaagggtatcttcgaagaggcacatggagacccccagtactgaaacttgcaatgacatggctgttgctggggacccaaataaccctttgttactgtggaaagctaatagtgatggcagtataccttgtccaccaaaggaaatagggggctgcggtgcttcatctttggtactcagatgcttattaccagaaattatgctttctgagttagaacacagggctaacaaagttattaagagagaagcatttgataaagcaataaacgaaacaagtgatcagtgcccttgcttttatcacacaagcaagataagaacaaatgctactcgagaggcagcaaacagaaagggctcaagtgataactacttgtactgtccagatgccaataatatccaggaggatgacctgtcgcactttcagatgcattggtcaaaaggtgaaccggttattgtttctgatgctcttcggttaacatctggtctgagctgggagccattggttatgtggcgggcattgcgagagaagaaaaccaatggtgatgttgaagatgagcactttgctgttaaggcagtggattgccttgattggaatgaggtggaaattaacatacacatgttctttatggggtatatgagaggtagaagacatccgatgaccttttggcctgagatgcttaagctaaaagattggccaccatctagtatgtttgaccagaggttacctcgccatggtgctgagtttataactgcattgccatttcccgagtatactgatccacgatatggcccgctaaatcttgctgtcaggcttcctgctggtgtactgaagcctgatcttgggccaaaaacttatattgcttatggatgttatgaagagttaggcaggggtgactctgtgaccaagcttcattgcgacatgtctgatgcggtaaatatcttgatgcacacagctgaagtgtcctatgacactgaacagcttgacaagatagcaaaaattaaaatgaaaatgagagaacaagatcttcatgaactgtttggggtttcagaatcaggcgccaagggtaaagctgatgatgaagcatcgaaaatctcatgtaacatggaaaacaaacacacctctaaccaaagtactaagggtttggacattaatgctttaccacctgatgattctggaagtgatattggggataaaccatcattttgtcaatctgaggtagaaagtgaattaacacaatgttcaaaacacaatcacgaggttaatagttctgtcaagatgcatgctggagctcattgtacttcagacaaccaaggatacattgacaggagtggattcaaacgcaaagattcagactgttcagaccaacagaaaactggtggcgctttgtgggatattttccgaagagaagattctgagaagttacaagattatcttcggaagcatgcctcagaatttcggcacatacactgcaatccagtgaaaaatgtttctcacccaattcatgaccagactttctatttaactgtggagcataagagaaagctcaaggaagaacacggtgttgaaccatggacattcgagcagaagctaggcgatgcagttttcattcctgctggatgtccacaccaagtgagaaatttaaagtcttgcatcaaggttgctctagactttgtttcccctgaaaatgttggtgagtgtgttaagctgaccggagagtttagacgtcttccatctgatcacagggctaaagaagataaactagagattaagaagattgctctcaatgctcttaaagaagtcgtaaatttcttagatcctttaccaaaaggggatgaagtggtagaagtgaccaaaccaaaaaggaaatacggtaaccgaagaggtgacctgaagagtggggaagaccaacccattgatgaatccatagaagaaaggaagcctaaaaagcgagggagatctaaacggtga

SEQ ID NO: 154 - protein, 1052 aa, Oryza sativa
MEMEEAVDGKHPKRGRGRPRGRRGRGRGRGRGGRSLASPAAGPGDQGPRRRRGVVPAAAAAAGGRALRERRPAPGAYRESGADNDDDGGGDDEHDEQNDDGAEKSDNQVVDSLNEPNRSNTGKKRGRPKKVKAEQEDSNQLSNGKHLGENNGNDEAIMMKPSKESKKRGAGKKQEEEENNTISIEDEMCDANNKKGKKMLTGENALMCHQCQRNDKGRVIWCKSCNNKRFCEPCMKRWYPGLSEVDFAAKCPYCRKNCNCKACLRMIGVEKPPEKKISEENQRRYAFRIVDLLLPWLKELQQEQMKEKELEGRLQGVSMDEVKLEQADCDMDERVYCDRCKTSIVDFHRSCKACSYDLCLACCWELRKGEIPGGEEAKSVQWEERGQKYVFGNISKDEKKRVSSKRHMETPSTETCNDMAVAGDPNNPLLLWKANSDGSIPCPPKEIGGCGASSLVLRCLLPEIMLSELEHRANKVIKREAFDKAINETSDQCPCFYHTSKIRTNATREAANRKGSSDNYLYCPDANNIQEDDLSHFQMHWSKGEPVIVSDALRLTSGLSWEPLVMWRALREKKTNGDVEDEHFAVKAVDCLDWNEVEINIHMFFMGYMRGRRHPMTFWPEMLKLKDWPPSSMFDQRLPRHGAEFITALPFPEYTDPRYGPLNLAVRLPAGVLKPDLGPKTYIAYGCYEELGRGDSVTKLHCDMSDAVNILMHTAEVSYDTEQLDKIAKIKMKMREQDLHELFGVSESGAKGKADDEASKISCNMENKHTSNQSTKGLDINALPPDDSGSDIGDKPSFCQSEVESELTQCSKHNHEVNSSVKMHAGAHCTSDNQGYIDRSGFKRKDSDCSDQQKTGGALWDIFRREDSEKLQDYLRKHASEFRHIHCNPVKNVSHPIHDQTFYLTVEHKRKLKEEHGVEPWTFEQKLGDAVFIPAGCPHQVRNLKSCIKVALDFVSPENVGECVKLTGEFRRLPSDHRAKEDKLEIKKIALNALKEVVNFLDPLPKGDEVVEVTKPKRKYGNRRGDLKSGEDQPIDESIEERKPKKRGRSKR

SEQ ID NO: 155 - DNA, 3717 bp, Oryza sativa
atgatgggggttaccaccacgctcaacgaggacactgaaccctctattccacctggatttggaccttttgctacccttccgttatggggaatccacaatgatgccaaacctgctgttactcattctactcctgttcaagcattgcaaagcattagaaaagacagcgaagaatgccaacccagtgcggctgtgtctcggagtgatacaccttgcagcacttccggaacccagacatgcagaaaatcactgcgtaacagacccccaatagactatagccgctttgaacatatatcggatgaagattctgatgtcgaaatagtggaaaaggatgtaagttcaacgagacgcagacaacagctaccgaaaggagtacttcgaggatgtgcagaatgcagtgactgtcaaaaggttatcgcaaaatggaatccagctggtgcacgcaggcctgttcttgatgaggctcctgttttctatccaacagaggaggaatttgaagacactctaaaatacattgagagtatacggccaatggcggaaccatatggtatttgccgtattgtcccaccatcttcttggaagcctccatgccttcttaaagataaaagcatatgggaaggatcaaaattctctactcgggtacaaaaggttgacaagctccaaaaccgtaaatcatcaaaaaagggcagaagaggtggaatgatgaagaggagaaagcttgcagagtcagaggagaacagtgccactgctcacactcagacagggatgcagcaaagtccagagagatttggatttgaacctgggccagagttcacgttacagacatttcagaaatatgcagatgatttcagtaagcagtactttaggaaagatacatcgatggattcagtaccatcagtggaagatattgaaggtgagtactggcgcatcgttgaggttcccacagaagagatagaggtgatatatggtgctgatctggagactggaactttcggcagtggttttccaaaattatctcctgagacaaaatctgatgctgaggataaatatgcacaatctggttggaatctaaataacttgcctagactacaaggttcagttctttctttcgagggcggtgacatttctggtgttctagtgccttgggtgtatgttggcatgtgtttttcatcattctgctggcatgttgaagaccatcatttatactcactaaactacatgcattggggtgccccaaagttgtggtatggagttccaggaaaggatgctgtgaatttggaatctgcaatgaggaaacatctacctgaattatttgaggagcaacctgatttgctacacaaccttgttacccagttttcaccatcgctgctgaaatctgaaggagtacatgtataccgttgtgttcagcatgagggcgagtttgtcttgacattcccaagggcgtaccatgctggtttcaattgtggcttcaattgtgccgaagctgttaatgtggctcctattgattggttaccgattggacataatgctgtagagctttatcgtgagcaagctaggaaaataaccatttctcatgataagttgttgttgggggctgcaagagaagcaataagagctcagtgggatatcctattcctcaagaggaatactgctgataatatgaggtggaagagtatatgcggagctgatagcactatattcaaggctcttaaggcacgaattgagacagagttggtgcaaaggaaaactctaggtgttccagctcaatcaaggaaaatggatgctgaattcgattccattgatagggaatgtgccttgtgctactatgatttacatctttctgcttctggctgtccatgctgcccagagaaatatgcttgccttgtacatgcaaagcaactttgctcatgtgactgggacaaaaggtttttcctattccgctatgatgtcaatgagctaaatatcttagctgatgctttaggggggaaattaagtgccattcatagatggggcgtctctgatcttggattaagtttgagttcatgtgtcaaacgagaaaaggtccaagattccaagactgttcgcagattaactgatggtccaagaaggtcttacatgtcacaggcatcagcagtatccttggtttcttcttctacttccaatgaacagaaagatgaaggaaataagatcatgaagatagctagcccacagacaaataatgtgtgcccttctgtcgagcaaaggaaatcagagaatatttcaccattgaaggagccatgtgtaaggaatgagttgtcatgtacaacaaattctgatagtaacggattgcaatataatggaggacttggaggccataaaggatctgcaccaggcttgccagtttcttctagcccatcattttcttccaacgttgcaacaaggcccattagtacttcaagtgtatccatgaaaattgtgcaaggcttggtggcatctaaaagttgtatacaagcttcctctcgaactggagacagtagatcattgcttggtgagcatcataacagatcaccggcaatgattcatgatggaaccaacatgaagtccagtttggaaagctcaaacaattcttgcaggttgattgcatctgactataatgcaactccgtgtcattcatccaaggatcaggtattagtaacaccagggactaatgcctcagtagtgactctgaaagatagcagccaggtccatagtgcgtcaagtcagcagtttgtcagaactggcccatggacacaaagtgcttctcatgaagcatcatcacctagtacctctgctttgaagccttctttagatccccctgccatgaaaaatctgtatgggggttttactcaaggcagtgcccatcctggacctccaagtttcagtaatcagcaaccaaatgatgggcgtcttcaaagaacatctgaatctctaccaggtgtggaagctagagctaggggacatccaactgtcacggcacagcctgcactagaaattcacagcaggaatggaggtgcacagaagggtcctcgcatagccaatgttgtgcatcgtttcaagtgctctgttgaacctctcgaaattggtgttgtgctatcagggaggctgtggtcttcaagccaagcaatcttcccgaaagggtttagaagcagagtgaaatacttcagcattgtggatccaatccaaatggcatactacatatcggaaatactggatgctgggatgcaggggcctctgtttatggtaaaattagagaactgtccaggtgaagttttcattaacttatctccaaccaagtgttggaacatggtccgtgaaaggctgaacatggaaataaggaggcaacttaatatgggaaaatcaaatcttcctacattgcagcctccaggatcagttgatggtcttgaaatgtttggtttattatcaccaccaatagttcaggcaatttgggcgcgggacagagatcacatctgtacagagtactggagatcaaggccccatgttctcattgaggatccaaacaatcggcatatgttatctcagggtccacctctccttgccctgaggggtctcatccaaagggctaaccgggatgaattgcaagtcctgcggagtttgatgacgaacagcaacaatttggatgatagctccaggcaacaggccgcgcacattatcgaagaggagattgcgaagcaattgtgctga

SEQ ID NO: 156 - protein, 1238 aa, Oryza sativa
MMGVTTTLNEDTEPSIPPGFGPFATLPLWGIHNDAKPAVTHSTPVQALQSIRKDSEECQPSAAVSRSDTPCSTSGTQTCRKSLRNRPPIDYSRFEHISDEDSDVEIVEKDVSSTRRRQQLPKGVLRGCAECSDCQKVIAKWNPAGARRPVLDEAPVFYPTEEEFEDTLKYIESIRPMAEPYGICRIVPPSSWKPPCLLKDKSIWEGSKFSTRVQKVDKLQNRKSSKKGRRGGMMKRRKLAESEENSATAHTQTGMQQSPERFGFEPGPEFTLQTFQKYADDFSKQYFRKDTSMDSVPSVEDIEGEYWRIVEVPTEEIEVIYGADLETGTFGSGFPKLSPETKSDAEDKYAQSGWNLNNLPRLQGSVLSFEGGDISGVLVPWVYVGMCFSSFCWHVEDHHLYSLNYMHWGAPKLWYGVPGKDAVNLESAMRKHLPELFEEQPDLLHNLVTQFSPSLLKSEGVHVYRCVQHEGEFVLTFPRAYHAGFNCGFNCAEAVNVAPIDWLPIGHNAVELYREQARKITISHDKLLLGAAREAIRAQWDILFLKRNTADNMRWKSICGADSTIFKALKARIETELVQRKTLGVPAQSRKMDAEFDSIDRECALCYYDLHLSASGCPCCPEKYACLVHAKQLCSCDWDKRFFLFRYDVNELNILADALGGKLSAIHRWGVSDLGLSLSSCVKREKVQDSKTVRRLTDGPRRSYMSQASAVSLVSSSTSNEQKDEGNKIMKIASPQTNNVCPSVEQRKSENISPLKEPCVRNELSCTTNSDSNGLQYNGGLGGHKGSAPGLPVSSSPSFSSNVATRPISTSSVSMKIVQGLVASKSCIQASSRTGDSRSLLGEHHNRSPAMIHDGTNMKSSLESSNNSCRLIASDYNATPCHSSKDQVLVTPGTNASVVTLKDSSQVHSASSQQFVRTGPWTQSASHEASSPSTSALKPSLDPPAMKNLYGGFTQGSAHPGPPSFSNQQPNDGRLQRTSESLPGVEARARGHPTVTAQPALEIHSRNGGAQKGPRIANVVHRFKCSVEPLEIGVVLSGRLWSSSQAIFPKGFRSRVKYFSIVDPIQMAYYISEILDAGMQGPLFMVKLENCPGEVFINLSPTKCWNMVRERLNMEIRRQLNMGKSNLPTLQPPGSVDGLEMFGLLSPPIVQAIWARDRDHICTEYWRSRPHVLIEDPNNRHMLSQGPPLLALRGLIQRANRDELQVLRSLMTNSNNLDDSSRQQAAHIIEEEIAKQLC

SEQ ID NO: 157 - DNA, 2916 bp, Oryza sativa
atggtttcctcccgcgaccccggcgaggaggccagcgcgccgccgcccccgcccccgcgccgcggcgagaagcggcgaatgcgcggccgcaccccgtcgccggagccggcctccgcgccgcaggatctctgcccatcaggagcttgcggggacaatgttgctggagctacaactacaaatggaaagtggcatccacatgaatcgtacagacctgaaattgatgatgcccctgttttcactccaacggaagaggagtttaaagatccaattagatatattacgagcattcgtccccaagcagaaaagtatggaatttgtcgtattgttccaccatcttcttggcgaccgccttgttctctgaaggagaagaacttctgggaatgtacagagttcaatacccgtgttcaacaagttgacaagcttcaaaaccgggaacccacaaagaaaaaatcacaacctcgagttcagaagaagaggaagaggagaaagagactgagatttgggatgactcacaggcgtcctagtgcaaatacatcagaagactgcgcagatgcagacgagaagtttggctttcaatctggctcagatttcacactagatgagtttcagaaatatgcagatgagtttaagcagcagtattttggaataaagggaagtgacgaaatccctctttctgaaattaaaaagaagaaaaaaaattggcaaccatcggtcgatgaaatagagggagaatattggcggatagttgtatgccccactgacgaagttgaggtggattatggtgctgatttggacacttcaatgttcagtagtggattctctaaattatcttcagattcaaatagacgagatccatatggtttatcttgttggaatttgaacaatcttccacgtattcctgggtctgtactgtcatttgaaactgaggatatatctggcgtcgtagtcccttggctttatgtagggatgtgcttctcatcattctgttggcacgtggaagatcatttcctttattctatgaattacatgcattttggtgaaccaaaagtatggtatggtgttcctggtgctgatgcagtgaagctggaagaagctatgagaaagaacttaccaagattgtttgaagaacagcctgatctcctacatgagctggttacgcaattatctccttctgttcttaaatcagaaggagttcctgtttatcgtgttgttcagaatccaggcgagtttgttctaacgctaccgcgagcttaccattctgggttcaactgtggcttcaactgtgcggaggcagtaaatgtcgcacctgtggattggctgcctcacggacaatgtgctgttgagctctacagggagcagcggcgcaagacatccatatcacatgacaaattattactaaaaactgcaaatgaagctgtcagacagctttggatgaaccttagcgactgcaaaagtgaacaaggagtatacagatggcaggatacttgcggaaaggacggaatgctgacaagtgcaattaagacaagggttaaaatggagaaggcagcacggggagggaatatggcactgcgatataagaaaatggatggggattatgattcagctgaccgggaatgcttttcatgtttttatgatctccatttgtcagctgtcagctgccaatgctccccaaatcgttttgcttgcttaaaccatgcaaacattctatgttcatgtgaaatggacagaaaaaccgcgttgttgcggtataccatagaggagctccatactcttgttgcagctctagagggtgatccaactgcggtctaccagtggggacagaatgatttaggtttagtctgcccatctggttctactcagtacaagaagatggacttgggtgaaaacacggaatttccggattcagcaaccaacgtcaatcatggctgcagcttaggaagtcaagatcaatatcactatgaccccgcaaagccagcaggataccagcaagagaagggaatccagattgcttcagaaaaacatgataagaacaagatggttgtcaatcttgagtctccagcaacagctagtaatccaagcaggtcaaagtctgactgcagtggctcactgtccttgaatcattcatctgagttaccatcttcaagaattcaaacaggaaattctacgctagcttccattaccacagagaaactgtttggtgttgacattaaatccaatttagcacagtcttctgatggccaagttagtcaattggccaagccttcctcgagccaaactgatgaagtctctaagccagcaatagctaagtatacggttgagctgctagacagtggaacaatgatgattggtaaaaagtggtgcaatcagcaagctatattccccaaaggatttaagagtcgagttacatttcatagtgtactagatccaacaaggacatgctgctacatctccgaagttcttgatgctgggcttcttggaccattgtttagggtgactgtcgaaggtcttccagaagtttcgtttactcacacatcaccaatgcaatgttgggacagtgtaagagacagagtaaatgaagaaatagcaaaacaaataagttttggaaaatctggccttcctgattttctatcctgcaattctttgaatggacttgaaatgtttgggttcttatcctcccctataattaaggaaatcgaggctctagatccctgtcaccaatgcttggactattggttgtcaagggtttcttctgttggaactgaactcccctcggaatctgtgatggcagcaatggttaatgactccactaaccccccaataaagttgctcgggattgagattaaccggagggaatcagaacaatcaagtagcttcaataattcctgtgtgaggaggtcacacttggcaggttgctga

SEQ ID NO: 158 - protein, 971 aa, Oryza sativa
MVSSRDPGEEASAPPPPPPRRGEKRRMRGRTPSPEPASAPQDLCPSGACGDNVAGATTTNGKWHPHESYRPEIDDAPVFTPTEEEFKDPIRYITSIRPQAEKYGICRIVPPSSWRPPCSLKEKNFWECTEFNTRVQQVDKLQNREPTKKKSQPRVQKKRKRRKRLRFGMTHRRPSANTSEDCADADEKFGFQSGSDFTLDEFQKYADEFKQQYFGIKGSDEIPLSEIKKKKKNWQPSVDEIEGEYWRIVVCPTDEVEVDYGADLDTSMFSSGFSKLSSDSNRRDPYGLSCWNLNNLPRIPGSVLSFETEDISGVVVPWLYVGMCFSSFCWHVEDHFLYSMNYMHFGEPKVWYGVPGADAVKLEEAMRKNLPRLFEEQPDLLHELVTQLSPSVLKSEGVPVYRVVQNPGEFVLTLPRAYHSGFNCGFNCAEAVNVAPVDWLPHGQCAVELYREQRRKTSISHDKLLLKTANEAVRQLWMNLSDCKSEQGVYRWQDTCGKDGMLTSAIKTRVKMEKAARGGNMALRYKKMDGDYDSADRECFSCFYDLHLSAVSCQCSPNRFACLNHANILCSCEMDRKTALLRYTIEELHTLVAALEGDPTAVYQWGQNDLGLVCPSGSTQYKKMDLGENTEFPDSATNVNHGCSLGSQDQYHYDPAKPAGYQQEKGIQIASEKHDKNKMVVNLESPATASNPSRSKSDCSGSLSLNHSSELPSSRIQTGNSTLASITTEKLFGVDIKSNLAQSSDGQVSQLAKPSSSQTDEVSKPAIAKYTVELLDSGTMMIGKKWCNQQAIFPKGFKSRVTFHSVLDPTRTCCYISEVLDAGLLGPLFRVTVEGLPEVSFTHTSPMQCWDSVRDRVNEEIAKQISFGKSGLPDFLSCNSLNGLEMFGFLSSPIIKEIEALDPCHQCLDYWLSRVSSVGTELPSESVMAAMVNDSTNPPIKLLGIEINRRESEQSSSFNNSCVRRSHLAGC

SEQ ID NO: 159 - DNA, 1140 bp, Oryza sativa
atgtcatgtttgagttgggagccaccagatatgtggtctaaagtacatggcaccggcactagtcctgagatgaaaaacgtgaaggctattgattgtttatcttgctgtgaggtcgagatatgcactcaagacttcttcaatgggtattatgaaggtcggatgtatcaaaatctatggcctgaaatgcttaaattgaaggactggcctacatcaaatcattttgaagagcttttgccttcccatggagttaaatacatgaattctttaccttttcaaccatacacaaacttgaagtctggtttgctgaatgtctcaaccttgcttcctgatgacatcttaaagcttgacatgggcccaaaatcatatatagcttatggctatgcacaggaacttggtagaggagattctgttacaaagcttcactgcgatttgtctgatgcagttaacgttttgatgcatactgctgaagttgacccttccgaggaacaaatagatgcaataaaaagtttgaaaagaagacatacagcgcaaaatgaaaaggagtgttctgggaatgcagacggaaattatacatctcctaaaatctgtggggatgcaaatgagttgtcctgtcctataaacagtgagaccaacaagggaggtgctttatgggatatttttaggagggaagatgttccaaaactgaaattgtatctcgacaagcattctaaggaatttcgccatatatactgttctgcagttcaaaaggtatgtaaccctgtacatgatgaaacattttatctaacagaagaacacaagagaaaactcaaggaggagcatggaattgagccttggacatttgtacaaaaacttggggaggcagtattcattcctgctgggtgtcctcatcaagtacggaatcttaagtcctgcaccaagattgccttggattttgtatcacccgagaatgttaaggagtgtctcagcttaaccgaggacttccgaagacttcctaagaaccacagggccaaagaagacaaattagagctaggtgtggttcaaaatggacccaagcccacataccctcgagaaactattctaaactctcaatgggacatcttgttgtttgcatatcatccaaatagttatgacaaagtttaa

SEQ ID NO: 160 - protein, 379 aa, Oryza sativa
MSCLSWEPPDMWSKVHGTGTSPEMKNVKAIDCLSCCEVEICTQDFFNGYYEGRMYQNLWPEMLKLKDWPTSNHFEELLPSHGVKYMNSLPFQPYTNLKSGLLNVSTLLPDDILKLDMGPKSYIAYGYAQELGRGDSVTKLHCDLSDAVNVLMHTAEVDPSEEQIDAIKSLKRRHTAQNEKECSGNADGNYTSPKICGDANELSCPINSETNKGGALWDIFRREDVPKLKLYLDKHSKEFRHIYCSAVQKVCNPVHDETFYLTEEHKRKLKEEHGIEPWTFVQKLGEAVFIPAGCPHQVRNLKSCTKIALDFVSPENVKECLSLTEDFRRLPKNHRAKEDKLELGVVQNGPKPTYPRETILNSQWDILLFAYHPNSYDKV

SEQ ID NO: 161 - DNA, 2577 bp, Oryza sativa
atgcaacaggtggagggcaggaactgtcttcctgcggaggtcaggattggcctcgagacgctcaagaggcgccggcttgagaggatgcgtttgactgctcagaacaatgccggcgacggtcctccggtgcccgcaaggagcggtggggatgcgctaaggactcccgcaaactgcggggtcaggttgcatgctaacaatggcacagctctacctagcagaaccacccagaacaaggacccttttgcaaagcgcagggtggacaagtttgatatgtctagcctagaatggattgacaagatcgaagaatgccctgtgtactatcctaccaaggaggagttcgaggatcccattggttatatacagaagattgcacctgtggcttcgaaatacggaatttgcaaaatcgtatctccagtaagcgcttctgttcctgctggtgtcgtgttgatgaaggaacagcctggtttcaagttcatgaccagggttcagccgcttcgcctcgccaaatgggctgaagatgacacggtcactttcttcatgagcgaaagaaagtacactttccgggattatgagaaaatggccaacaaggtgttcgccaagaaatactcaagtgctagttgtctcccagctaagtacgtggaggaggaattctggcgcgaaattgcttttggtaaaatggattttgttgaatatgcctgtgatgttgatggtagtgctttctcctcttctcctcatgatcaacttgggaaaagcaactggaacttgaagaatttttcacggctttccaattctgtgcttagacttctgcagacaccaattccaggagtaacagatccaatgctttatatcgggatgctcttcagcatgtttgcttggcatgtggaagatcattatttgtacagcatcaattaccatcattgtggggcatttaagacatggtatggcataccgggtgatgctgctcctgggtttgaaaaggtggctagccagtttgtatacaacaaggatattttggttggtgaaggagaggatgcagcatttgatgttctcttggggaagacaacaatgttccccccaaatgtcttgttagaccacaacgttcctgtttataaagctgtgcaaaaacctggggagtttgtcattactttccctcgttcctaccacgcgggtttcagccacggcttcaattgtggcgaggctgtcaactttgctatcagtgactggtttcctctgggttctgtggccagcagacgctacgcgcttctgaacagaacacccttgcttgcacacgaggagttactttgccgttctgcagtgcttctgtcccacaaactgttaaacagcgacccaaaatccctcaataaatctgagcatccacattcacagcgttgtttgaagtcttgctttgtgcagttgatgcgattccagagaaacacacgtggcctacttgctaaaatgggctctcagatacattataagccaaaaacatacccgaatctctcatgtagcatgtgtcggcgtgattgctacattacacatgtgttgtgtggatgcaactttgacccagtctgtcttcatcacgaacaagaactccggagctgcccttgtaaatctaaccaggttgtctacgttagggaggacatacaggagctagaagctctatcaagaaaatttgagaaggatatttgcttggataaggaaataagtggttttgactcatacaagcaggccgaaaagaatgagccattttttgagataactcggaacctcaggaacactgaagtaaatttgatagaggatgccttctcaggagcaactgctgctgatgctgcaaagagttctcctgcaacgtcaacactgacatcttttgcacaacatgatgtgcctgttcttgctgaagcaattgtctgtgctaatcaagccgaccaattatactccaccaccgagcaaaccatcagctcacctttagtcaaaggaactgatgctgtgggtgcaaattcatccagcatggctgatgctaataacggaactggttcttgtaatgcttcagctgtggaatacagtggaaattcagattctgaatctgaaatatttcgagtcaagcgcaggtctggcgtatcagtaaagcctgcatctgatgccaagacatcaaacttgtctgatcaacaggttctcaggcggttgaagaaggtgcgccctgaaatacaacagcacaataagcgaccagaagactatggtcactgttcagttccctcaggtcgtatgagtatgaagaatttgaattcatcctcctcatgtggtgaagaacactggaggatgaagcggcggcagttggagactcagcaggatgagagcagttattctgcaaagcagaagtcgtactcgtatccatccaccagctattctttccgaggagagtttgtggaaatgagtagagatgctgctgcagaagtccgaccaaagcgactgaaaatccggctaccttcttctagcacgaacagagtggttgagcagggcagttcagggcaaagatttacaagggatgacaagtcgcttggttgttggcctgcaatttag

SEQ ID NO: 162 - protein, 858 aa, Oryza sativa
MQQVEGRNCLPAEVRIGLETLKRRRLERMRLTAQNNAGDGPPVPARSGGDALRTPANCGVRLHANNGTALPSRTTQNKDPFAKRRVDKFDMSSLEWIDKIEECPVYYPTKEEFEDPIGYIQKIAPVASKYGICKIVSPVSASVPAGVVLMKEQPGFKFMTRVQPLRLAKWAEDDTVTFFMSERKYTFRDYEKMANKVFAKKYSSASCLPAKYVEEEFWREIAFGKMDFVEYACDVDGSAFSSSPHDQLGKSNWNLKNFSRLSNSVLRLLQTPIPGVTDPMLYIGMLFSMFAWHVEDHYLYSINYHHCGAFKTWYGIPGDAAPGFEKVASQFVYNKDILVGEGEDAAFDVLLGKTTMFPPNVLLDHNVPVYKAVQKPGEFVITFPRSYHAGFSHGFNCGEAVNFAISDWFPLGSVASRRYALLNRTPLLAHEELLCRSAVLLSHKLLNSDPKSLNKSEHPHSQRCLKSCFVQLMRFQRNTRGLLAKMGSQIHYKPKTYPNLSCSMCRRDCYITHVLCGCNFDPVCLHHEQELRSCPCKSNQVVYVREDIQELEALSRKFEKDICLDKEISGFDSYKQAEKNEPFFEITRNLRNTEVNLIEDAFSGATAADAAKSSPATSTLTSFAQHDVPVLAEAIVCANQADQLYSTTEQTISSPLVKGTDAVGANSSSMADANNGTGSCNASAVEYSGNSDSESEIFRVKRRSGVSVKPASDAKTSNLSDQQVLRRLKKVRPEIQQHNKRPEDYGHCSVPSGRMSMKNLNSSSSCGEEHWRMKRRQLETQQDESSYSAKQKSYSYPSTSYSFRGEFVEMSRDAAAEVRPKRLKIRLPSSSTNRVVEQGSSGQRFTRDDKSLGCWPAI

SEQ ID NO: 163 - DNA, 1566 bp, Oryza sativa
atgccgagcgccttccactccctcctcctccccgccattcgcaaccccaaacctagccgtcgccgcggccgcggccgcggcggcagcaaacgccccaagaagaccaccaaatccaagaaccgcctcgccgacgccgccgccggagacgccaccgccttccacctgaagacctccgcgcgcgccggtccggggggtgccgggagcggccggcgaggcgatgggggatgcctcgtgcagccgctcggcaacctcctcctcctcggcggcggcggcaacctccgcgacgcggggctcggcgcgctccgcccgctccccgacgacgtcctcctcgacgtgctcggcctgctcgcggcgcgcgacctcgctaggctctccgcggcgtcgagggcgctctacgtcgtcgcctcccacgacccgctctggcgggcgctcgtcctcgacgagctcggcggggacttcgccttctcgggctcgtggcgcgccacctacatcgccgccgcgtcgggcggccgcgcccacctccccccgcggggcctagagatcagggggttctactccgactacctcttccagagctggctctgcgccaacatggagatgcggccggagtggctccaccgggacaccatcgatcgccgccgcggcatgtccgtcgagcaattcgtctccgaattcgaggagcccaataggccggtgcttctggaaggctgcctcgagagctggccagcattgcagaagtggaccagggagcacttgctgaaggtctcggccgggaaggagttcgccgtcgggccggtgagcatgacgctggataggtacctccagtatgccgacaatgtgcaggaggagaggccattgtacctgttcgatgccaagttcaccgagaaggtgccggagatggggagggactatgaggtgccggcgtacttccgagaggacctattcggggtgcttggggaggaaaggccggaccaccgatgggttatcattgggccggcaggttcagggtcgtcgtttcatgttgatccaaactcgacatcggcgtggaatgctgtgatcaagggagccaagaagtgggtgatgttcccaccggaggtggtgccgccaggagttcatccaagtgcggatggagcagaagtcactagccctgtatctatcatggaatggttcatgaatttttatggggcatgtaagacctgggaaaagaggcctgttgagtgtatatgccgggctggagaggtggtttttgtgcctaatggatggtggcatttggttatcaatctggaggaatctattgcgattactcagaattatgtgagcaggaggaatctgttgaatgttcttgactttctcaagaggcccaatgcaagtgaacttgtatcagggactacagacagggtaaacctgcatgacaagttccgcaatgccatcgatatgacttatcctgggatgattaaacagcttgaacttgaagctcagcagaaggctgctgctcgcaagaagaaagtctcgttctgggaatctgcggtagatgccaatactggaggattcaagttctcattctga

SEQ ID NO: 164 - protein, 521 aa, Oryza sativa
MPSAFHSLLLPAIRNPKPSRRRGRGRGGSKRPKKTTKSKNRLADAAAGDATAFHLKTSARAGPGGAGSGRRGDGGCLVQPLGNLLLLGGGGNLRDAGLGALRPLPDDVLLDVLGLLAARDLARLSAASRALYVVASHDPLWRALVLDELGGDFAFSGSWRATYIAAASGGRAHLPPRGLEIRGFYSDYLFQSWLCANMEMRPEWLHRDTIDRRRGMSVEQFVSEFEEPNRPVLLEGCLESWPALQKWTREHLLKVSAGKEFAVGPVSMTLDRYLQYADNVQEERPLYLFDAKFTEKVPEMGRDYEVPAYFREDLFGVLGEERPDHRWVIIGPAGSGSSFHVDPNSTSAWNAVIKGAKKWVMFPPEVVPPGVHPSADGAEVTSPVSIMEWFMNFYGACKTWEKRPVECICRAGEVVFVPNGWWHLVINLEESIAITQNYVSRRNLLNVLDFLKRPNASELVSGTTDRVNLHDKFRNAIDMTYPGMIKQLELEAQQKAAARKKKVSFWESAVDANTGGFKFSF

SEQ ID NO: 165 - DNA, 432 bp, Oryza sativa
atggtggcagacagcgcggtcggcgtgcacggcagtgcggccgacagtgggtcggtgcggtcggcgcggacggcggcagagagggacgcggaggcggaggctacgcgggacacaaaggcagcggcggtggagccgccagagtggctgcagaccctgcccgtggcgccggagtaccacccgacgctggtggagttcgccgaccccatcgcctacatcctcaggatcaagcccgaggcgtcccgcaacggcatttgcaagatccaggtcggcctctccaccaagaaccgccgtgccgccagccgccgagtgtgggagagcggggagcgctacaccctggaggcgttctgcgccaaggtgcccgagttcgagccctcgaggcacgccgcactgcccaagaaccccacccacctccagctcaaggccctcttctag

SEQ ID NO: 166 - protein, 143 aa, Oryza sativa
MVADSAVGVHGSAADSGSVRSARTAAERDAEAEATRDTKAAAVEPPEWLQTLPVAPEYHPTLVEFADPIAYILRIKPEASRNGICKIQVGLSTKNRRAASRRVWESGERYTLEAFCAKVPEFEPSRHAALPKNPTHLQLKALF

SEQ ID NO: 167 - DNA, 4101 bp, Oryza sativa
atgtcgctgcagccgccggcggtggagccgccggagtggctgcggacgctgcccgtggcgccggagtaccacccgacgctggcggagttcgccgaccccatcgcctacatcctcaggatcgagccggaggcgtcccgctacggcatctgcaagatcgtgcccccgctcccgcggccccccgaggacgacaccttccgccgcctccaggccgccttcgccgccgcggcctcctccaatggcgacccctccccgaccttccccacgcggctccagcaggtcggcctctccgccaggaaccgccgcgccgccagccgccgggtgtgggagagcggggagcgctacaccctggaggcgttccgcgccaaggcggccgagttcgagcccccgaggcacgccgcgccgcccaggaaccccacccacctccagctcgaggccctcttctgggccgcctgcgcctccaggcccttcagcgtcgagtacggcaacgacatgcccggctccggcttcgcctcccccgacgagctccccgacgccgccaatgccaccgacgtcggggagacggagtggaacatgcgggtggcgccccgcgcccgggggtcgctgctccgcgccatggcccgcgacgtggcgggcgtcaccaccccgatgctgtacgtggccatgctctacagctggttcgcctggcacgtggaggaccacgagctccacagcctcaacttcctccacttcggcaaggccaagacctggtacggcgtcccccgcgacgccatgctcgccttcgaggagacggtgcgcgtccacggctacgccgacgacctcaacgccatcatggcctttcaaacgttaaatgagaagacaactgtcttatctcctgaggtgcttctttctgctggtgttccctgctgcagattggttcaaaaagcgggagaatttgttatcacattccctggagcttatcattcaggctttagccatggatttaattgtggggaagcatcaaatattgcaactccccattggttacaagtggctaaagaagctgcaatccggagggcttcaactaattgtggtccgatggtgtctcattatcagctgctttatgagctagcactctcattgcgtccaagggagcctaagaatttctattctgttccaagaagctcacgtttaagggacaagaataagaatgaaggtgatataatggtcaaagaaaattttgttggaagtgtaaccgaaaacaacaatttgcttagcgcccttctggataagaattcttgtataattgttccaaacgctgatttcttcgttccatcctttcctgttgcactggaatctgaagttactgttaaacaaaggtttacagctggtccctgcagtattagccagcaaggagcagaaaatatggctgctgatcatgtggctgtagacaaggttacagagattcaggacatgagtggatccttatatccttgtgaaaccagtcttgtgggctgtagcaatagaaaactttatgaaacaaaatatggccaacgggatgctgctgctttgtgcttatctacttcagagattcagagcagaggaattgatacagcaagatcacatccagcaggcgggatcttagatcaaggacggttgccatgtgtacagtgcggaatactaagctttgcatgtgtagccatcattcaacctagagaagcagcagtacagtttatcatgtctaaagagtgcatctcatcgagtgcaaaacaaggaggaattggtgcatctgatgatacctcaaactggattgaccagagtcatgagattagtcctccaccaggtccagcatctggaacagatgataatgtaaagcatgccgtaagtttggcccatgtctctgatcggtgtagagaactatatgccagcaatacagatggatgcacctctgctcttgggcttctagcttctgcatatgactcatcagactctgatgatgaaacaactgaggatgtttcaaaacatagcaagaaaaatgattcagtaaaccaaagcacggatcctcaaatcttggaaacatcagctagctgttccagtacagttcagtgtcaaaagacaaattcacacttgcatgaagaggaatgtgaggcaagagccacatcattgatgaaacctgtaagccataatagtaggcccattagtcagtctaacagggatacagatatcgaccattttatagaactgggaaagtcaggaacacagtgttcaggttatcttgatttggttgatgatctaactacatcagttttaaaatcctcttcagatacttgtgtaagtgcagctaaagcctcaatggatccagatgttttgaccatgctcaggtacaataaagactcttgcagaatgcatgtgttttgtcttgaacatgctttggaaacatggacacagcttcaacaaatcggtggtgctaatattatgcttttgtgccatccagaataccctagagcagagtcagcagcaaaagtcatagcagaagaacttggtatcaagcatgattggaaagatatcactttcaaagaagcaactgaagaggacgttaaaaagattcagttggctttacaggatgaagatgctgaacccactggcagtgactgggcagtcaaaatgggtatcaacatatattacagtgccaaacagagcaaatcaccactttacagcaagcagataccatacaattccatcatttataaggcatttggccaagaaaacccagacagtttgacagattatggatgtcaaaagtcaggctcaacaaagaaaaaggtggctgggtggtggtgtgggaaagtttggatgtcaaatcaagttcatccacttctagctcgtgagcgtgaagaacagaacagtagcgtagtgtacggcaaagcaatgttcactactatttcccatggcaaagtacaagatgaagcgtcaacaagatgcaatacaagcaaccgaaccccatcaagaagaacatcaagaagaaaaaagggggtatctgctgagaaatctaaaccaaaaaacaagagatccactgcttctgatgaagctagtatgctttgcagtggccttggaatgaactctggagttatccatgaccaaactgaaaactctgatgattatgacaaacatggcaatggagatgaaattgaggaaggaacaaatcctcagaaatatcaacaacgtaaattgcaaaacgtgaccaggaaatcaagttctaagaagcggaaggatgagaaaagaacagatagttttcatgaactatatgacgaggataatggtgtggattattggcttaacatgggtagtggagatgatgccacactaggtaactctcgacaacaaagtcctgatccagtgaaagtgaaatctggaggcaaattgcaaggtaagagaaaatctagcaagtacaagtccaatgatgatttgttgaatgaagaaaataagttacaaaagatgaacaaaaaatcaagctctaagaagcaaaagaatgataagataaatagacaacttcaagaagatcaaaccgaagatgaccatatggaccacttagttgacgtagcggttgcagatgaagtcacactagacaatgaggataaaattacagaagacaaaattgatgacgtgaaagtgaaatctagaggaaaatcgcaaaatggtaagagaaaaggcagcaaacatcaggctaccgatggtttgcgcgctggaaataaagtggccaaatttccgtgtgatatagaaggatgtgacatgagcttcagtacccagcaggacttgttattgcataagcgtgacatttgtcctgtcaaaggatgcaagaagaagttcttctgccacaagtacttgcttcagcaccggaaggtgcatatagatgaaaggccacttaagtgtacatggaaggggtgtaagaaggcattcaagtggccatgggcgaggacggagcacatgagagtccatacgggggtaagaccttacgagtgccaggaacctggctgtggtcagacattccgattcgtttcagatttcagccgccacaagagaaagactggccattcctctgataagagaagaaagaacagtacataa

SEQ ID NO: 168 - protein, 1366 aa, Oryza sativa
MSLQPPAVEPPEWLRTLPVAPEYHPTLAEFADPIAYILRIEPEASRYGICKIVPPLPRPPEDDTFRRLQAAFAAAASSNGDPSPTFPTRLQQVGLSARNRRAASRRVWESGERYTLEAFRAKAAEFEPPRHAAPPRNPTHLQLEALFWAACASRPFSVEYGNDMPGSGFASPDELPDAANATDVGETEWNMRVAPRARGSLLRAMARDVAGVTTPMLYVAMLYSWFAWHVEDHELHSLNFLHFGKAKTWYGVPRDAMLAFEETVRVHGYADDLNAIMAFQTLNEKTTVLSPEVLLSAGVPCCRLVQKAGEFVITFPGAYHSGFSHGFNCGEASNIATPHWLQVAKEAAIRRASTNCGPMVSHYQLLYELALSLRPREPKNFYSVPRSSRLRDKNKNEGDIMVKENFVGSVTENNNLLSALLDKNSCIIVPNADFFVPSFPVALESEVTVKQRFTAGPCSISQQGAENMAADHVAVDKVTEIQDMSGSLYPCETSLVGCSNRKLYETKYGQRDAAALCLSTSEIQSRGIDTARSHPAGGILDQGRLPCVQCGILSFACVAIIQPREAAVQFIMSKECISSSAKQGGIGASDDTSNWIDQSHEISPPPGPASGTDDNVKHAVSLAHVSDRCRELYASNTDGCTSALGLLASAYDSSDSDDETTEDVSKHSKKNDSVNQSTDPQILETSASCSSTVQCQKTNSHLHEEECEARATSLMKPVSHNSRPISQSNRDTDIDHFIELGKSGTQCSGYLDLVDDLTTSVLKSSSDTCVSAAKASMDPDVLTMLRYNKDSCRMHVFCLEHALETWTQLQQIGGANIMLLCHPEYPRAESAAKVIAEELGIKHDWKDITFKEATEEDVKKIQLALQDEDAEPTGSDWAVKMGINIYYSAKQSKSPLYSKQIPYNSIIYKAFGQENPDSLTDYGCQKSGSTKKKVAGWWCGKVWMSNQVHPLLAREREEQNSSVVYGKAMFTTISHGKVQDEASTRCNTSNRTPSRRTSRRKKGVSAEKSKPKNKRSTASDEASMLCSGLGMNSGVIHDQTENSDDYDKHGNGDEIEEGTNPQKYQQRKLQNVTRKSSSKKRKDEKRTDSFHELYDEDNGVDYWLNMGSGDDATLGNSRQQSPDPVKVKSGGKLQGKRKSSKYKSNDDLLNEENKLQKMNKKSSSKKQKNDKINRQLQEDQTEDDHMDHLVDVAVADEVTLDNEDKITEDKIDDVKVKSRGKSQNGKRKGSKHQATDGLRAGNKVAKFPCDIEGCDMSFSTQQDLLLHKRDICPVKGCKKKFFCHKYLLQHRKVHIDERPLKCTWKGCKKAFKWPWARTEHMRVHTGVRPYECQEPGCGQTFRFVSDFSRHKRKTGHSSDKRRKNST

SEQ ID NO: 169 - DNA, 1242 bp, Glycine max
atgttgacgacaactgtatccggcggcgaccctccttctcgcggttttgatacgccgacgctggaccgggaagcggcggcgctgctccacgcgatctccgagcatggcgggtacgcgtacgtgagcatggcggtgctggcttccggcggcgacattcgcgcggcggaggcggcgtgggagatggcgtgggagcagctgcactcgggtccgtggcactcggtgctgccggtgtggcgcgacgcttactccatggcgtgcctccacgtggcgcgccaccactacggcaacggtgagttcttggacgcacttagggttttggatttgggaatcatcatgggaggcacgctcctccgcaaggatttggactccgccatcgagaaaatgtcggaacaaacgaggaagaccgttagggtttctgatttggggaactccgagcaccgactcgtcgatcgcgaatttgatatggcagaggtgctccaacttttacctgtgaagtctctttcaacgaaacttgtggtgaagaaatcggcgctgtccttggagaaattcctgaaggatcattacctgtctggctgcccggttattatcagtgattgtatgtctcactggccagccaagatgaaatggaatgacgaagattacttgctgagagttgccggagaccgtacagttccagttgaggttgggaaaaactatttatgtactgagtggaagcaagagctaattactttttcagagtttcttcagcggataaagtctgatagctgttctcctggtggtcctacatatcttgctcagcatccattatttgatcagataaatgagcttcggaaagatatctttattcctgactattgttttactggtggaggggagctacgatctctcaatgcttggtttggtccagcaggaacagtaacaccgttacaccatgatccacatcataacatactagctcaggttgttggaaagaaatacattaggctatactcttcgtctttatctgaggaactttccccccactctggtaccatgctccacaactccagccaggttgatttagatgatatggatgaaaagaagtttccgaaggtgcaagacttggaatttgtagactgtattttagaggaaggcgaaatgttatatatcccgccaaaatggtggcactatgtgcggtctttgactaccagtttttcggttagcttttggtggagtgagggtgaaagttcggatgcatcctaa

SEQ ID NO: 170 - protein, 413 aa, Glycine max
MLTTTVSGGDPPSRGFDTPTLDREAAALLHAISEHGGYAYVSMAVLASGGDIRAAEAAWEMAWEQLHSGPWHSVLPVWRDAYSMACLHVARHHYGNGEFLDALRVLDLGIIMGGTLLRKDLDSAIEKMSEQTRKTVRVSDLGNSEHRLVDREFDMAEVLQLLPVKSLSTKLVVKKSALSLEKFLKDHYLSGCPVIISDCMSHWPAKMKWNDEDYLLRVAGDRTVPVEVGKNYLCTEWKQELITFSEFLQRIKSDSCSPGGPTYLAQHPLFDQINELRKDIFIPDYCFTGGGELRSLNAWFGPAGTVTPLHHDPHHNILAQVVGKKYIRLYSSSLSEELSPHSGTMLHNSSQVDLDDMDEKKFPKVQDLEFVDCILEEGEMLYIPPKWWHYVRSLTTSFSVSFWWSEGESSDAS

SEQ ID NO: 171 - DNA, 1464 bp, Arabidopsis thaliana
cttagtcaatagcatcttctccgatcatcgacgtccggagatttcttcggccctctcatacttgagttgttgtaggatttgttgctctggctctggtggtaggtctatgaaatcaacccatatcgtgaatggactgcaacatggtatcttcgtcccagtgggattgggagcatttgatcatgtccaatccgtcaaggactgaagatgacagcaaacagctacctactgagtgggaaattgaaaaaggtgaaggaattgaatctatagttccacatttctcaggccttgagagagtcagtagtggctctgccaccagcttctggcacactgctgtatcgaaaagctcacagtcgacctctatcaactcatcatctcccgaagccaaacgatgcaagcttgcatcagaaagttcccctggagattcttgcagcaacatagactttgtccaggtgaaggctcccacagctctcgaggtatccgttgcctcagctgaatcagatctttgtttaaaactaggaaagcggacatactctgaagaatactggggtagaaacaataatgaaatttcagcggtttctatgaagttgttaactccatctgttgtcgctgggaaatccaaattgtgtggtcagagcatgccagtcccgcgttgccaaattgatggctgtgaactggatctctcatctgctaagggttatcatcgtaagcacaaagtctgcgaaaagcattcaaagtgcccaaaagttagcgtgagtggcctggaacgtcggttctgccaacagtgtagcaggttccatgctgtctctgaatttgatgagaagaaacgaagctgccgaaaacgtctttctcatcataatgcgaggcgtcgtaagccacaaggagtattttcaatgaatcccgagagggtgtatgatcgaagacagcatacaaatatgttgtggaatggggtgtcccttaacgcgagatctgaagaaatgtatgaatggggtaataacacttatgatacaaagcctagacaaacggaaaaaagctttactctgagcttccagagaggtaatggctctgaggaccagctggttgctagtagcagccgtatgttctctacatctcaaacctcaggtgggttcccagcaggaaagtccaagtttcaacttcatggcgaagatgtgggagaatactcaggagtcctccatgaatctcaagatatccaccgtgctctctctcttctgtcaacctcttcggatcccctggcccaaccacatgtgcagccattttctctactctgttcatatgatgttgtaccaaaatagatgagtaagtaatgtgtaatttgtaaacctgttactcagttggtggatacttttccaaacctatgataaaaacctcgtcctagatcccgttaaatgccaaactttcggctactataactatgttatcgttatcattatcattgtttaacaccct

SEQ ID NO: 172 - protein, 393 aa, Arabidopsis thaliana
MDCNMVSSSQWDWEHLIMSNPSRTEDDSKQLPTEWEIEKGEGIESIVPHFSGLERVSSGSATSFWHTAVSKSSQSTSINSSSPEAKRCKLASESSPGDSCSNIDFVQVKAPTALEVSVASAESDLCLKLGKRTYSEEYWGRNNNEISAVSMKLLTPSVVAGKSKLCGQSMPVPRCQIDGCELDLSSAKGYHRKHKVCEKHSKCPKVSVSGLERRFCQQCSRFHAVSEFDEKKRSCRKRLSHHNARRRKPQGVFSMNPERVYDRRQHTNMLWNGVSLNARSEEMYEWGNNTYDTKPRQTEKSFTLSFQRGNGSEDQLVASSSRMFSTSQTSGGFPAGKSKFQLHGEDVGEYSGVLHESQDIHRALSLLSTSSDPLAQPHVQPFSLLCSYDVVPK

SEQ ID NO: 173 - DNA, 2124 bp, Nicotiana tabacum
gtacaaaaaagcaggctggtaccggtccggaattcccgggatatcgtcgacccacgcgtccgccgtgatgtaatcttggtgatgctacttattcccttttcccttcttgagcccaaactcaagaaggtcaaaaacaaaaaaattacaaaaagctggaatcttgcagtttttttatttaatttatttatcctatgttgaattaatttttggggtcaatatttcccaatttgtagtctccaatggagcctcgtgttggtaataagttccggcttggccggaaaatcggtagcggttcttttggagagatctatctcggcgctaatgttcaaactaacgaagaggttgcaattaagctggaaaatgtgaaaacaaagcatcctcaactattatacgaagcaaagttgtataaaatactacaaggaggaactggaatccccaatttaaaatggtttggagttgaaggagattataatgcccttgtgatggatttgctggggcctagtcttgaagatctcttcaacttctgcagtaggaagctgtctttaaagaccgttctcatgctcgcagatcagatgattaatcgggttgaatttgttcatgccaaatcttttcttcatcgagatataaaacctgacaactttcttatgggattaggaagacgtgcaaatcaggtctatatgattgattttgggctggccaagaagtatagagactcatcaactcatcagcatattccgtatagagaaaacaaaaatttgacaggaactgctagatacgcaagcatgaatactcatcttggcattgaacaaagtcgaagggatgatttggaatcgctgggttatgttttaatgtacttcttaagaggaagtctcccttggcaggggctgaaagcaggcactaagaaacagaagtatgagaagatcagtgagaagaaagtatcaacatcaatagagaccttgtgtaggggatatcctgcagagtttgcatcatattttcattactgtcgatcactaagatttgatgataaaccagattatgcttatctgaagagaattttccgtgatcttttcattcgtgaagggtttcaatttgattatatatttgactggaccattttgaaatatcagcaatcacagcttgccaatcctccatctcgtgctcttggtggtactgctgggccaagctcagggatgcctcatgctcttgttaatgttgagaggcaatcaggtggagatgaaggtcgaccaactggttggtcttcatcaaatcttacacgtaataagagcacggggctgcatttcaattctggaagcttattgaagcaaaaaggcacagttgctaatgatttatccatgggtaaagagttatccagttctaattttttccggtcaagtggaccattgaggcgtccagttgtctctagcatccgagacccagtgattgcagggggtgaacctgacccctccggcactctgacaaaagatgcaagcccgggaccattgcgtaaagtatccagtgctgcacggaggagttcaccagttgtgtcctcagatcacaagcgcagctcctctatcaaaaatgccaacataaagaatttagagtccaccgtcaagggaatagagggtttaagttttcgatgatgagggactgcattagtagctgtgctttgtctcagttctccgttcactgtaaattttggcacaccaacttggggagtaagagttctgatattagttgctgtcaggaagtaccataaagctgaattatacaattaaaatttgggatccaatcgcaaaagcacattaaggatatgatggggttgcagatccaaactcacagattccagtttatgctcgtccatacagttataggcactttccatattcttttctttaatctctgtctcttgcttgttattgttatgtcgtggtattcttgttgaggtcatgtttgtgaattgcgaagatggtcatgtataattgccgagaaatcatgtactagtttgttttaaacatgagcaaactgttattttgttcaagctactttaatatcaaaaaaaaaaaaaaaagggcggccgctctagagtatccctcgaggggcccaagcttacgcgtacccagcttt

SEQ ID NO: 174 - protein, 466 aa, Nicotiana tabacum
MEPRVGNKFRLGRKIGSGSFGEIYLGANVQTNEEVAIKLENVKTKHPQLLYEAKLYKILQGGTGIPNLKWFGVEGDYNALVMDLLGPSLEDLFNFCSRKLSLKTVLMLADQMINRVEFVHAKSFLHRDIKPDNFLMGLGRRANQVYMIDFGLAKKYRDSSTHQHIPYRENKNLTGTARYASMNTHLGIEQSRRDDLESLGYVLMYFLRGSLPWQGLKAGTKKQKYEKISEKKVSTSIETLCRGYPAEFASYFHYCRSLRFDDKPDYAYLKRIFRDLFIREGFQFDYIFDWTILKYQQSQLANPPSRALGGTAGPSSGMPHALVNVERQSGGDEGRPTGWSSSNLTRNKSTGLHFNSGSLLKQKGTVANDLSMGKELSSSNFFRSSGPLRRPVVSSIRDPVIAGGEPDPSGTLTKDASPGPLRKVSSAARRSSPVVSSDHKRSSSIKNANIKNLESTVKGIEGLSFR

SEQ ID NO: 175 - DNA, 1828 bp, Oryza sativa
gcttgagtcatagggagaaaacaaatcgatcatatttgactcttttccctccatctctcttaccggcaaaaaaagtagtactggtttatatgtaaagtaagattctttaattatgtgagatccggcttaatgcttttcttttgtcacatatactgcattgcaacaattgccatatattcacttctgccatcccattatatagcaactcaagaatggattgatatatcccctattactaatctagacatgttaaggctgagttgggcagtccatcttcccaacccaccaccttcgtttttcgcgcacatacttttcaaactactaaatggtgtgttttttaaaaatattttcaatacaaaagttgctttaaaaaattatattgatccatttttttaaaaaaaatagctaatacttaattaatcacgtgttaaaagaccgctccgttttgcgtgcaggagggataggttcacatcctgcattaccgaacacagcctaaatcttgttgtctagattcgtagtactggatatattaaatcatgttctaagttactatatactgagatgaatagaataagtaaaattagacccaccttaagtcttgatgaagttactactagctgcgtttgggaggacttcccaaaaaaaaaagtattagccattagcacgtgattaattaagtactagtttaaaaaacttaaaaaataaattaatatgattctcttaagtaactctcctatagaaaacttttacaaaattacaccgtttaatagtttggaaaatatgtcagtaaaaaataagagagtagaagttatgaaagttagaaaaagaattgttttagtagtatacagttataaactattccctctgttctaaaacataagggattatggatggattcgacatgtaccagtaccatgaatcgaatccagacaagttttttatgcatatttattctactataatatatcacatctgctctaaatatcttatatttcgaggtggagactgtcgctatgtttttctgcccgttgctaagcacacgccacccccgatgcggggacgcctctggccttcttgccacgataattgaatggaacttccacattcagattcgataggtgaccgtcgactccaagtgctttgcacaaaacaactccggcctcccggccaccagtcacacgactcacggcactaccacccctgactccctgaggcggacctgccactgttctgcatgcgaagctatctaaaattctgaagcaaagaaagcacagcacatgctccgggacacgcgccacccggcggaaaagggctcggtgtggcgatctcacagccgcatatcgcatttcacaagccgcccatctccaccggcttcacgaggctcatcgcggcacgaccgcgcacggaacgcacgcggccgacccgcgcgcctcgatgcgcgagcccatccgccgcgtcctccctttgcctttgccgctatcctctcggtcgtatcccgtttctctgtcttttgctccccggcgcgcgccagttcggagtaccagcgaaacccggacacctggtacacctccgccggccacaacgcgtgtcccccctacgtggccgcgcagcacatgcccatgcgcgacacgtgcacctcctcatccaaactctcaagtctcaacggtcctataaatgcacggatagcctcaagctgctcgtcacaaggcaagaggcaagaggcaagagcatccgtattaaccagccttttgagacttgagagtgtgtgtgactcgatccagcgtagtttcagttcgtgtgttggtgagtgattccagccaagtttgcg

SEQ ID NO: 176 - DNA, 2194 bp, Oryza sativa; identical to SEQ ID NO: 10

SEQ ID NO: 177 - DNA, 56 bp, Artificial sequence
  primer: prm8667
ggggacaagtttgtacaaaaaagcaggcttaaacaatggactgcaacatggtatct

SEQ ID NO: 178 - DNA, 54 bp, Artificial sequence
  primer: prm8668
ggggaccactttgtacaagaaagctgggtcacattacttactcatctattttgg

SEQ ID NO: 179 - DNA, 2046 bp, Oryza sativa
atgaataccccagaaaagaaaccactgtgctatacttctagaagagcactgcaacagaggacagaatcctcttcggaattgatctctgtatcaaaaagagcaacccgccagaatactccacgcaagccggattctcctcccaaacgaacaacaagaagtagcgctaacctggcgaaatgtatagagaacaaacaccatagcagtcctctgaagcggcggcggggttcagatgcggctaccggaaagtctgcaacagggccaacaaggaggaagcataaacagaaaaggaaaaatgatgagagtgatgaggtcagtcgcatggaaaaaagagcaagatatttacttatcaaaataaaacaggagcagaatttgctagatgcatactctggagatggttggaatgggcacagtcgagagaaaataaagccagagaaggagctacagcgtgctaagaaacagatcatgaaatacaaaatcgctatccgtgacgtcattcaccaacttgatttgtgtagttccagtgggagcaaggatgactctgtgattccaccagatgggtgtcacgagtctgtcaatcctgaacatacaatatgttcaaggtgcaaatcccacgagtcatttcctgacaataacattatattctgtgaggggggctgcaaactggcgtgtcatcagaaatgtttggagcctccttttgataaaattcttccaactacccgccatgggcggctttgcaaacactgttcttccaagatgaaaattttagacgccattaatgcccatctggggacaagttttacagtgaagtgtccctccagtgatattttcaaggaagcagctgaacatttcaactctgatgatggactgggccaagattggctatctgagtattcaggtgatgaggactatgaccctgaagaaaatgaggccagcagcagtggtgaagagaataaatctgccgattccaattgttcagggagtccactttattctccaaatgatgatattccagacttcatatcagcagatttcaatgatgctgaaggattctgtcgtgaaagttcaaatctaggaatcgattttggtgaagatggtttggctgagattcttacccaccaaaggccaagaagagatgttgactatacacaacttaatgagcaaatgtttggagagcctattggcaatgacgaacagagtgaagatgaagattggggtcttaacaagagaaagaaaagaagaactggttcaactggtgttgggactaattccgtagagggtcgatcagatgtcaaatccaataagaaagcccaacctcggagaaaacttttcaggattcctcctgcggcagttgaggtgctccgtaaagcttttgctgaaaatgagcttcctgcccggagtgtcaaagaaaatctctcaacagagctgggtatttcttttgaaaagattgataagtggttcaaaaatacacggtgtgctgctctcagggataggaagggtgaaagtcgttattctggtcccagcaaaaggtcaagaacaagcatagaaaaggctgaaacttcagctaaagtggatcaaatggacaactcatgctttcttcccttatctgaaataatcaacgtgcccacacgtctgcagaaaggtcttgataagaagccaaaatcaattaacagccctccaagacctcaggacaatgaaacttgcttgtcgccaactgataaaaccaaggagggtacaccgcctacgatcaagccttccatcacagattctagtcaactgatgaataacgacatcggcactgaggagactgctgtttcttgggtggacacttgggcctctgacgctctgcatttcttggacgtgagcgatgatgaacatttcttcgatgtgatcgagaaggtgtgcggtctcgagaatcggctgcagcggttgaaggagaacatgctatcatcgtcatcgtcaactgacaacaatgtggctgctgagagtggcttgcaaaacgaagttgtgcttgtaccagctgctgagctcaaggataaagcatcttaa

SEQ ID NO: 180 - protein, 681 aa, Oryza sativa
MNTPEKKPLCYTSRRALQQRTESSSELISVSKRATRQNTPRKPDSPPKRTTRSSANLAKCIENKHHSSPLKRRRGSDAATGKSATGPTRRKHKQKRKNDESDEVSRMEKRARYLLIKIKQEQNLLDAYSGDGWNGHSREKIKPEKELQRAKKQIMKYKIAIRDVIHQLDLCSSSGSKDDSVIPPDGCHESVNPEHTICSRCKSHESFPDNNIIFCEGGCKLACHQKCLEPPFDKILPTTRHGRLCKHCSSKMKILDAINAHLGTSFTVKCPSSDIFKEAAEHFNSDDGLGQDWLSEYSGDEDYDPEENEASSSGEENKSADSNCSGSPLYSPNDDIPDFISADFNDAEGFCRESSNLGIDFGEDGLAEILTHQRPRRDVDYTQLNEQMFGEPIGNDEQSEDEDWGLNKRKKRRTGSTGVGTNSVEGRSDVKSNKKAQPRRKLFRIPPAAVEVLRKAFAENELPARSVKENLSTELGISFEKIDKWFKNTRCAALRDRKGESRYSGPSKRSRTSIEKAETSAKVDQMDNSCFLPLSEIINVPTRLQKGLDKKPKSINSPPRPQDNETCLSPTDKTKEGTPPTIKPSITDSSQLMNNDIGTEETAVSWVDTWASDALHFLDVSDDEHFFDVIEKVCGLENRLQRLKENMLSSSSSTDNNVAAESGLQNEVVLVPAAELKDKAS

SEQ ID NO: 181 - DNA, 2391 bp, Arabidopsis thaliana
atggaggagagtgaaacaaaggggagaatcagtcaagaaactgataaggcttgtgtttcagttgagagaattgggtctactttactctcatcatttgtgaagaaaggtaaagaagtatcaaataagagaaattctaagcagaataagcgaaaagcggaagaagaactctgttcgaaatcaagaaccaagaagtactctcggggatgggtccgttgtgaggaaatggaggaggagaaggttaagaaaacaagaaagaggaaaagtaagagacagcaaaaggataataaggttgaggttgatgattctttaaggttgcaaaggaggacaaggtatttgctcattaagatgaagatgcagcagaatcttatcgatgcatacgcaactgaaggttggaaaggtcagagccgggaaaagataagaccagacaaggagcttgagagagcccggaaagagatcttaaactgcaagcttggactacgcgacgccattcgccaactggatctgcttagttctgtgggaagcatggaagagaaagtgatagcttcagatggatctattcatcatgatcatatattttgtgcagaatgcaattctcgagaagcttttccagacaatgatataatactttgtgatggaacgtgtaatcgagcatttcaccagaaatgccttgaccctcctttggaaacagaaagcatacctcccggagatcagggctggttttgcaaattttgtgattgcaaaattgaaattatcgacacaatgaatgcacaaattggaactcatttccctgtggacagcaactggcaggatatcttcaatgaagaagctagtcttcctattggatctgaagctacagttaacaatgaagcagattggccttcggatgactccaaggatgatgattatgaccctgaaatgagggaaaacggtggaggaaacagcagcaacgttagtggtgatggtggtggtgataacgatgaagaaagcatttcaactagcttgagcttatcatctgatggtgttgccctttcaacgggatcatgggaaggccatagactcagcaatatggtggagcagtgcgaaacaagtaatgaagaaactgtatgtgggccaagacagcgaaggactgttgactatacacagttgtactatgaaatgtttggaaaggatgcagttttgcaagagcaaggtagtgaagatgaagactggggtccgaatgacagaaggaagagaaaaagggaatctgatgcaggaagcacacttgtaactatgtgtgaaagcagtaagaaagatcaagatgttgtagaaacgctagaacagagtgagagagattctgtctctgtggaaaataaaggaggtcgaaggcggatgttcagactcccaagaaatgcagttgagaagctacgtcaagtatttgcagagactgagcttccctcaaaagctgtgagggatcgtcttgcaaaagagctgagtcttgatccagagaaggtcaataaatggtttaaaaatactcggtatatggcactgcggaataggaagactgagagcgtgaaacaacctggggattctaagacagtctctggaggagattctggaccagaagcagtcatggagaacaacactgaaacaaatgaagttcaagatactttggatgacactgttccacccggatttgacgctacaaatcaaaacatactctccccatgtaataacaaccaggaggaatttcaacaggaaaatgtctcttttccttcacccacagatgaaagtcaacagtatctggaacaaaacgattcttctttcgttctagtgccacatgaaaagcaaagcagcgaaattagcttaaagacggctgtagaggagaatgagacagaaagcaagatgatgaaagagccacatgaagagctaagcagtgaaatgagcctaaagacggctgctgaggagaaggagacagagagcaagatgatagaagagccacatgaagagctaagcagagaaatgagcttaaagacggctgtagaggagaaggagacagagagcaagatgatggaagagccacatgatgagctaaacagcgaaatgagcttaagtacagcggtagaggagaaggagacagggagcaagatgacggaagagtcacatgaagagctaagcaacgaaatgagcttagaagagaaggagacggggagaaagatgacggaagaggaagaattggaagcagtaatggagatgctttgtagaacagaaaacaagttactggacgtgacgcagaggcttgatagatttaaaacaccaaaaggccgaaaaaagttaggcaattcttcttctcctttacttgaagaagactcagtagtgtatgttccaatagcagagatcaaggagaaaaggtaa

SEQ ID NO: 182 - protein, 796 aa, Arabidopsis thaliana
MEESETKGRISQETDKACVSVERIGSTLLSSFVKKGKEVSNKRNSKQNKRKAEEELCSKSRTKKYSRGWVRCEEMEEEKVKKTRKRKSKRQQKDNKVEVDDSLRLQRRTRYLLIKMKMQQNLIDAYATEGWKGQSREKIRPDKELERARKEILNCKLGLRDAIRQLDLLSSVGSMEEKVIASDGSIHHDHIFCAECNSREAFPDNDIILCDGTCNRAFHQKCLDPPLETESIPPGDQGWFCKFCDCKIEIIDTMNAQIGTHFPVDSNWQDIFNEEASLPIGSEATVNNEADWPSDDSKDDDYDPEMRENGGGNSSNVSGDGGGDNDEESISTSLSLSSDGVALSTGSWEGHRLSNMVEQCETSNEETVCGPRQRRTVDYTQLYYEMFGKDAVLQEQGSEDEDWGPNDRRKRKRESDAGSTLVTMCESSKKDQDVVETLEQSERDSVSVENKGGRRRMFRLPRNAVEKLRQVFAETELPSKAVRDRLAKELSLDPEKVNKWFKNTRYMALRNRKTESVKQPGDSKTVSGGDSGPEAVMENNTETNEVQDTLDDTVPPGFDATNQNILSPCNNNQEEFQQENVSFPSPTDESQQYLEQNDSSFVLVPHEKQSSEISLKTAVEENETESKMMKEPHEELSSEMSLKTAAEEKETESKMIEEPHEELSREMSLKTAVEEKETESKMMEEPHDELNSEMSLSTAVEEKETGSKMTEESHEELSNEMSLEEKETGRKMTEEEELEAVMEMLCRTENKLLDVTQRLDRFKTPKGRKKLGNSSSPLLEEDSVVYVPIAEIKEKR

SEQ ID NO: 183 - DNA, 2151 bp, Eucalyptus grandis
atgcattccagaaagaatcttgcccaaaaagaagactttttgaaggcagaatctggatcggaggttcttgcctcgctgatattgagaaataggagaaggaaaaagcacaaacagaaactacaatcttctgtaaaagcaagaggctcaacccttgccaagaagagggccaataactccatcagaaagagactggtgcgtaggaacagctctgataaagacaaactcataaatttaaaagcttttcataataagaaaattgaaatagttcccgagaagctttcatcccctccatcttcagaaagagagctgcctattgcttctgacgaaaatgtgcaaaacaccgatgaggatgtcaaagttaacaagctgagaaggaagaggaagaagaaaatgagaaagcatttttcgaagttagatgaggcttcacgattgcagaggagaacaagataccttcttattaaaatgaagctggaacagaaccttattgatgcttactctggtgaaggctggaaaggccagagtcgggaaaagatcaagccaacaaaggaattacaaagggccaggaagcagatactgaattgcaaactcggaatacgtgatgctattcgacagctagactccattagttcagtgggcagcattgaagactctgtgattgctcctgatggttctgttcaccatgaacatatattctgtgcaaaatgcaagacaaatgaaacttcctcagataatgatatcatactctgcgatgggacatgcaattgtgcttttcatcaaaaatgtcttgatcctccactggaaactgaaagcattcccccaggagatcagggctggttttgcagactctgcgagtgtaagatggaaattatagagtcaacaaatgcacatctggggacccacttttctcttgacagcaactggcaggatatattcgaggaagaagctgcattgcctgatgggggaattcaggtgcttgacctagacgaaaagtggccttcagatgactctgaagatgatgactatgacccagaaaagatgacgaacaccggcatcaactgtgccggcaatgatgattctcaatcatacgacacaagtagctctaccagcctgagttggtcattagatggtgaaattttgtcaggaccaacaatatcaggcaaggaagggttgaactatcctgagagcattgcagggtctgatgtattaatggacacggatactgatactgtatgtggcccacgacagcgaaatgctgttgattataagcagctttataatgaaatgttcggtaaggatactcctgcctgtgaacaagccagtgaagatgaagactggggtcctaataaaagaagaagaagagaaagggaaacagatgcagccagcaccctcatgactctctgtgaaagtgagaaaaacaatccattcattgaccaagcctcagaaggtgataagaaactctctgcagaagcaagaatgagaaggcggattttcagaattcctccaactgcagttgagaagcttcgccaagtatttgcagagaatgaacttccctcaagatctgtcaaagaaaatcttgctaaagagtttggtcttgaacctgagaaggttagcaaatggttcaagaatgcacgatacatggcactcaaaacaagaaaggctgggggggctgatcaacctccaaaatccccgcaaaagcataaagaatctgaactagcaaaaatgatgaaaggggctgcgcctattttatctaaggatgcctcaacagacattgaattccattcctctctaaatactgagaaagtcatccagcaaaagagtacgaagccaatacacgggaagggttcacctatggtacctgaacatagctatatggagaattttgagttcgatgacaatatgtccttgaaacaaataaagctattgaaaggaaaaccaaaggacaggaagagggttgacttcgcagccagtgagggattacgagaaagagaagctcagttgcgggagctatgtaaaattagaagtaggctagatagtctgaggaagagaacccttacatttcagtcgagtgaatccaaggcttcagacgaattcaacacttgtagatcacgtgtagtatatgttccagtagcagaaataaaggagagagcttga

SEQ ID NO: 184 - protein, 716 aa, Eucalyptus grandis
MHSRKNLAQKEDFLKAESGSEVLASLILRNRRRKKHKQKLQSSVKARGSTLAKKRANNSIRKRLVRRNSSDKDKLINLKAFHNKKIEIVPEKLSSPPSSERELPIASDENVQNTDEDVKVNKLRRKRKKKMRKHFSKLDEASRLQRRTRYLLIKMKLEQNLIDAYSGEGWKGQSREKIKPTKELQRARKQILNCKLGIRDAIRQLDSISSVGSIEDSVIAPDGSVHHEHIFCAKCKTNETSSDNDIILCDGTCNCAFHQKCLDPPLETESIPPGDQGWFCRLCECKMEIIESTNAHLGTHFSLDSNWQDIFEEEAALPDGGIQVLDLDEKWPSDDSEDDDYDPEKMTNTGINCAGNDDSQSYDTSSSTSLSWSLDGEILSGPTISGKEGLNYPESIAGSDVLMDTDTDTVCGPRQRNAVDYKQLYNEMFGKDTPACEQASEDEDWGPNKRRRRERETDAASTLMTLCESEKNNPFIDQASEGDKKLSAEARMRRRIFRIPPTAVEKLRQVFAENELPSRSVKENLAKEFGLEPEKVSKWFKNARYMALKTRKAGGADQPPKSPQKHKESELAKMMKGAAPILSKDASTDIEFHSSLNTEKVIQQKSTKPIHGKGSPMVPEHSYMENFEFDDNMSLKQIKLLKGKPKDRKRVDFAASEGLREREAQLRELCKIRSRLDSLRKRTLTFQSSESKASDEFNTCRSRVVYVPVAEIKERA

SEQ ID NO: 185 - DNA, 2124 bp, Medicago truncatula
atgcgggatactgagaggttaaataaccaaggatctacaaaaccgagtaacacaaaggaacatatcaagttgaaggtagattccccacagttcaaaacaagtagcacaaaacaccaaaggaagaaacacagactgaaatcaaaatctcataaactcggaggttgcacaaatgcgtcagtgaggacagctactgattcttccaacaaggcgtcaaccaaggattcttcaaataaaacggataggaattcaacacaggttcagccttcaaaaaagatacaaggaggaaaaacttctcttaataatgataggaaaggtgagaaagatgttgttgatcaagagggaaatattcaaaaacgtaagagaaggagaaagaagaaaagacaaagacataatgtagatcttgatgatactgtacgcctccagagaagaacaaggaatatcttaatcagaatgaagcaagaacagaatcttatcgatgcttacgctggagaaggttggaaaggtcagagtcgagagaagattaggccagaaatggagctacaaagagcaaaaaagcagattttaaaatgcaagcttagtatccgtgatgccattcaccaactggattctcttagttcagttggtagtattgaaggttctgtcattgctacagatggatctgtttctcatgaacatatattctgtgcaaattgcaagataaacgaagtttctccagataatgatattatactctgtgatggcacatgcaatcgtgcgtttcaccagagatgtcttgatcctcctttggagactgaagacattcctcctgaagaccaaggctggttttgcaagtattgtgactgtaagatagaaatattggaggcaacaaacgcgcatcttgggactcgtttccccttagacagtacttggcaggatgtattcaaggaagaagctgctattcctgacggcgatgctgcattactaaatcaagaagaagaatggccgtcagatgatcctgaagacgatgactataatccagagaggaaagaagaaagccacggtggcttcaacacagaaggaaatgataaaaacgcatctgatgattcaagcagttcttccagcatgtggtctctaaatggagaatgctctctgttagatgaaggcatcaaccttgaatattattctaacgaccacatagattctgatgaatccggggaaatagcatgcggtcgtaggcagcgtagagctgttgactacaagaaactttatgatgaaatgtttggaaaggatgctccaccttgtgaacaagtgagtgaagatgaagattggggtcctcgaaaaagacggcgaagagaaaaggagtctgaggctgttaatactcttatgactctacatgagagtgaaaataaatatccgaataataagaacaatgatagaataagagggaattcttcaggcataaaaagaccttgttttaggttttcacatgaggcagttgagaagcttcgccaagtttttgcagagaacgagcttcctccaaaatccgtgaaggatgccctttcaaaagaattgggacttgatgctgcaaaggttaacaaatggttcaaaaatgcacgttacatggcacttaaaataagaaagcttcaagaaggaggacaacagcttcagagtatcacttctaagacctcaaaggattctacatcacaacatgtgcaggaagatgaggttttgaacccgaagtccgcgaaaattactgtgattagttccctgaagaagtgtgaaaatgttactggcaaagaaaaaacaaaagcatctagcaatcctttgaagaaaaagcgaccagaaatacctccatgcttgggagaaaatggcaacaaggattccatggaggtcagtgatgatgttagcttaatgaaactattacaagacaggaaaaagaaggtaagttttgcatttgaaggagactctgaggcagcagagttggaatttgaaagactcagcaaagtgaagacgaaaatagatagattgaagcaaagattaactggagttcaaaattgcagatcaaagggttcagatgaagttcatttgaatgagccatctattatgtatgttcctatagctgagttaagggaaaaggtgaaatag

SEQ ID NO: 186 - protein, 707 aa, Medicago truncatula
MRDTERLNNQGSTKPSNTKEHIKLKVDSPQFKTSSTKHQRKKHRLKSKSHKLGGCTNASVRTATDSSNKASTKDSSNKTDRNSTQVQPSKKIQGGKTSLNNDRKGEKDVVDQEGNIQKRKRRRKKKRQRHNVDLDDTVRLQRRTRNILIRMKQEQNLIDAYAGEGWKGQSREKIRPEMELQRAKKQILKCKLSIRDAIHQLDSLSSVGSIEGSVIATDGSVSHEHIFCANCKINEVSPDNDIILCDGTCNRAFHQRCLDPPLETEDIPPEDQGWFCKYCDCKIEILEATNAHLGTRFPLDSTWQDVFKEEAAIPDGDAALLNQEEEWPSDDPEDDDYNPERKEESHGGFNTEGNDKNASDDSSSSSSMWSLNGECSLLDEGINLEYYSNDHIDSDESGEIACGRRQRRAVDYKKLYDEMFGKDAPPCEQVSEDEDWGPRKRRRREKESEAVNTLMTLHESENKYPNNKNNDRIRGNSSGIKRPCFRFSHEAVEKLRQVFAENELPPKSVKDALSKELGLDAAKVNKWFKNARYMALKIRKLQEGGQQLQSITSKTSKDSTSQHVQEDEVLNPKSAKITVISSLKKCENVTGKEKTKASSNPLKKKRPEIPPCLGENGNKDSMEVSDDVSLMKLLQDRKKKVSFAFEGDSEAAELEFERLSKVKTKIDRLKQRLTGVQNCRSKGSDEVHLNEPSIMYVPIAELREKVK

SEQ ID NO: 187 - DNA, 2556 bp, Pinus radiata
atgccgaaagcaggaaaaggctcttccggttcactccgaaagaagcaagcgttgtcaaatacagcatcagagctaaggcctaaagctgcaattcagaagactaacaatgccgggagtatttctggcaggatgagggaaaggaaaccacggttacatgtacagatgattgcctcaattctcacgaaaaaaaggacaggtgaagcatctgaatcgagaaatgattctgagctagaagacaaacaatatctgagcaatagttcaaaaacaaatgccaattttgtagcggggaagttagttaaaaagactttgaaaaaagccccaagattaaacttgattaagaatgacagtcagaaaaaacccagtaagagttctgcttcgaggtcttatgctgcacagaaacctgaacggccacaacagagaaaaattaggaggacaaagtggaagggtgattctaaaaatataacaaaggtgaaaactgtgagaactagtaatatagatggcttgaagaggaagcagcaaaggagaaagaagaaaaagaaggcgcagaatgttccacaggatgaagtatcacgtgcaaagagaaggatcaaatatcttttgctcaaaatgaaacttgagcagaatcttattgatgcatattcaggggagggctggaaaggccagagtcgggagaaaataaagccagagaaggagttacagagagctgaaaagcagattctgcaatgcaaacttggaattcgtgaagcagtgcatcagcttgatcttctaagttcggaaggatctatagcagatgccgttattgatccagaagggcgtgtatttcatgagcatatattttgtgcaaaatgcaaaatgacagatgctcttccggataatgacataatattgtgtgatggagcttgcaatcgtggcttccatcagaaatgtctggatccacctttggctactgaaaacattcctcctggagatcagggttggctctgtaaagtttgcgaatgtaagctagagagtttggaagcaataaatgctcatttgggcacccagtttacagttgataatagctgggagggaatttttgctgatgcagctagaattgcgaatggtgaaagtacagctactgggaatggggaagaatggccatcagatgattcagaagatgatgactatgatccagagaaacaagagattagagatgaaacgggctatgagaataatatgagtgattctggaaagtcaagtggatggtcagaatcatataatgaaactgacaatgaatcagatgcttccttaacagataatctaaatgaatacatctctaagggaaagaagaggagcagagacactgatgaaaaaaacggacaagaagctataatagatttagatactgatgagaatgatggctcagacatgccagtttcagggagaaggcagcgaagagatgttgattataaaaagttgcatgatgaaatgtttggaaaagatggaccttgtgaagatgaagtcagtgaagatgaagactggggacccaataggaggcgtagaagagcgaaacagccggatacaaataccactaaggattcttcaaatgaagagaaagagcatgttagaaaggaagcagatgagaaagtagcagagcattcacaaagtagcataaaggataagaaacatattgtcagactgccagctaatgcagttgagaagctgcgcaaagtctttgctgaaaatgagctaccgtcaaggtcttacaaggaaaatctgtcacagcaactgggccttacatttcgaaaggtccatatgtggttcaaaaatgcccgttatatgtctctgaagagccgaaaggaaatgcctagaaatgagaactgcaatgaaactaatctcatgggagaaggtgatatggggccaaagaaaaaaataccaaaagagaagaaagcagaatcaacatgtcttttatcttctgttagagcagaatataaatctagaaatacaaaaaggaagcataggagaaaaaacatcaaagcacccttatctatctcttccagaagtgagagaaaaagaactatgtgcagactgcctgccaatgcagttgagaggtttcgccaagtctttgctgagaatgagttgccttcaatgtcctgtaaaatggcattatcaaagcagttggatctaccttatcggcaggtgcatatgtggttcaaaaatgctcgttatatgtctttgaagaagaaaaagatgaaccgtttaaaagaatcagctcccgttatttcctcacataccagaagacttgaagtagaaagtagcaaacccaatccacaaatcaaagagccagatgatgctggcaattcatacttaacagagatggaaaaattgggtaatattgagttgaaacttgaaaatatgagaaagattttagaaacagtctgtcctaaaagaggtactgatttttccaatgataagaatcaagaaggaatcgccaaccttcttagtgaggagcttcttgtgtatgtaccagtggtggagttgagggagaagagcttacaggttgctcctgtcaggtga

SEQ ID NO: 188 - protein, 851 aa, Pinus radiata
MPKAGKGSSGSLRKKQALSNTASELRPKAAIQKTNNAGSISGRMRERKPRLHVQMIASILTKKRTGEASESRNDSELEDKQYLSNSSKTNANFVAGKLVKKTLKKAPRLNLIKNDSQKKPSKSSASRSYAAQKPERPQQRKIRRTKWKGDSKNITKVKTVRTSNIDGLKRKQQRRKKKKKAQNVPQDEVSRAKRRIKYLLLKMKLEQNLIDAYSGEGWKGQSREKIKPEKELQRAEKQILQCKLGIREAVHQLDLLSSEGSIADAVIDPEGRVFHEHIFCAKCKMTDALPDNDIILCDGACNRGFHQKCLDPPLATENIPPGDQGWLCKVCECKLESLEAINAHLGTQFTVDNSWEGIFADAARIANGESTATGNGEEWPSDDSEDDDYDPEKQEIRDETGYENNMSDSGKSSGWSESYNETDNESDASLTDNLNEYISKGKKRSRDTDEKNGQEAIIDLDTDENDGSDMPVSGRRQRRDVDYKKLHDEMFGKDGPCEDEVSEDEDWGPNRRRRRAKQPDTNTTKDSSNEEKEHVRKEADEKVAEHSQSSIKDKKHIVRLPANAVEKLRKVFAENELPSRSYKENLSQQLGLTFRKVHMWFKNARYMSLKSRKEMPRNENCNETNLMGEGDMGPKKKIPKEKKAESTCLLSSVRAEYKSRNTKRKHRRKNIKAPLSISSRSERKRTMCRLPANAVERFRQVFAENELPSMSCKMALSKQLDLPYRQVHMWFKNARYMSLKKKKMNRLKESAPVISSHTRRLEVESSKPNPQIKEPDDAGNSYLTEMEKLGNIELKLENMRKILETVCPKRGTDFSNDKNQEGIANLLSEELLVYVPVVELREKSLQVAPVR

SEQ ID NO: 189 - DNA, 2178 bp, Populus tremuloides
atgggtgattctggaaagacgtcaaagctgcaagactcgcacaaatgttcaccttctgacacagtgactgggtcgttgctgattaaatcattgaagataaagaaggacagcaaaatatctcctagaaaaggccaaaaaacgaaaacaaaatcaaaaccaaaaccaatacctcatctaaaaactatcatcagttcagctgtatcaaaaagaaaagtttctcctaagggcattgggaatggctctaccagtagaaaactgattcataggaaaattctgcataaagcacttgataagaaggcctcaaggaagggggcttcctcagggctacaattgtcaactattgattctaagggaaatggaaaaaatggtgatgaaggtgcaattaaaaaactcaagaagaggaagcctaagaaaaggcaaagggacaaggtaaagctagatgaaccatcacgattgcagaggagagcaaggtacctgatgattaaaatgaagctggaccagaaccttatagatgcttactctggagaaggctggaaaggtcaaagtcgagagaagatcaggccagaaaaggaactactgcgagcaaggaagcagattttgaagtgtaaacttggtttacgtgatataattcggcaggtggattctcttagtacagtaggatgtattgaagagacagttatggctccagatggatctgtttcacatgaacatatattctgtgcgaagtgcaaattgaatgaagtttccccagataatgatattgtactctgtgatggtacatgcaactgtgctttccaccaaaaatgccttgaacctcccttggatactgaaagtatacctccaggagatcagggatggttttgcaagttctgtgaatgcaggatggatattatagaagctatgaatgctcatttgggaacccatttctcagaggacagcagttggcaggatattttcacagaagaagcagcaattcctgatgctggaaatgtgctattaaaccccgaagaagaatggccttcagatgattctgaagatgataattacgatccagagaggagagacaacatcatgagtgaagcgggtactgatgatgatgcatctgatgacatcagcagttcaaccagcttgggttggtcttcagatggtgaggtttttttgggatccaggaggtgggagatgcatggcttggacttcagaaacaattctatttatagcagtttagattctgatgaaaccagtgatggggaaattgtttgtggccgtaggcagagaagagcaattgactataagaagttatatgatgaggtgtttggaaaggatgctcctgcacacgagcaagccagtgaagacgaagattggggtcctggcaaaagaaagcgacgggagaaggagtcaaatgcagccagcacccttatgacactgtgtgaaagtaaaaaaaaaagtaaaagtgatgagaccattgaaggtatgatgaaccttccccctcaaactcgaaggccaattttcagactcccccctgatgcagttgagaaacttcgccaagtatttgtagaaaatgaacttccatctagaactgtcaaggagaatctgtcaaaagaattgggccttgaacctgggaaggttagcaaatggttcaagaattcccgttatttagctctgaagtcccggaaggtagagaaaggagaacaacttcataactctagttccaaagtctctgctgaacccacattaaatgtcatggagggcaaaactgctgatctttcacaggattcttgggaagaaactgaggtatgtatcccaaagaatttgaaaaggatccttcagaggaagaagctgaagtcaataagcagaagtttaaggaaaaatgaacagaaaagaggttcctacgaatcacctactaaaagcaatgagatgaatgctgagtgcagtgatgatgtgagcttgaagaagttgttaaaagcaaaaccaaagggagtaaagaaaaaggttaatcctatttcagtagcggctgaatatgatatggagagactctgtagagcgaaggctatattagagaagatgaagcagaaagtggtgaagctacaaaatggcaaagctaggaagtcatccaaaacccgtccacttgaagaatttatcgtttacattcccattgctgagttgaggggaaaaaattga

SEQ ID NO: 190 - protein, 725 aa, Populus tremuloides
MGDSGKTSKLQDSHKCSPSDTVTGSLLIKSLKIKKDSKISPRKGQKTKTKSKPKPIPHLKTIISSAVSKRKVSPKGIGNGSTSRKLIHRKILHKALDKKASRKGASSGLQLSTIDSKGNGKNGDEGAIKKLKKRKPKKRQRDKVKLDEPSRLQRRARYLMIKMKLDQNLIDAYSGEGWKGQSREKIRPEKELLRARKQILKCKLGLRDIIRQVDSLSTVGCIEETVMAPDGSVSHEHIFCAKCKLNEVSPDNDIVLCDGTCNCAFHQKCLEPPLDTESIPPGDQGWFCKFCECRMDIIEAMNAHLGTHFSEDSSWQDIFTEEAAIPDAGNVLLNPEEEWPSDDSEDDNYDPERRDNIMSEAGTDDDASDDISSSTSLGWSSDGEVFLGSRRWEMHGLDFRNNSIYSSLDSDETSDGEIVCGRRQRRAIDYKKLYDEVFGKDAPAHEQASEDEDWGPGKRKRREKESNAASTLMTLCESKKKSKSDETIEGMMNLPPQTRRPIFRLPPDAVEKLRQVFVENELPSRTVKENLSKELGLEPGKVSKWFKNSRYLALKSRKVEKGEQLHNSSSKVSAEPTLNVMEGKTADLSQDSWEETEVCIPKNLKRILQRKKLKSISRSLRKNEQKRGSYESPTKSNEMNAECSDDVSLKKLLKAKPKGVKKKVNPISVAAEYDMERLCRAKAILEKMKQKVVKLQNGKARKSSKTRPLEEFIVYIPIAELRGKN

SEQ ID NO: 191 - DNA, 2256 bp, Saccharum officinarum
atgcattcttcggaaaataaactggtatgctccaactcgggaagatcatcaaaagggaatgagacctctatggagttggttcctgtaccaaaaagaccaactagacatgatgcttcccgccaatgcaaatctgattctcctttgaagcgatcaccaaggaaagctagaaatgctactctggcaaaaagcataaagaataaatatcattgtagtcccctcaaacagcggagggcttcagattctgtttctggaaaagttgcgacaggactaactgtgaggaggaggaagaaaagaaaaatgcaaaatactgatgaggcaactcgcttggaacgaagagcgagatattttctaatcaagataaaattggagcagaatttgctagatgcttactctggagatggatggaatgggcaaagccgggaaaaaataaagccagataaggatctgcggcgtgccaggaaacaaatcataaaatgcaaaattgctatacgtgatatcattcgccaacttggtttgtatacttctactgggagtcttaatgacccagcaatgcctccagatcagtctaccaatccggaacataccatgtgctcaacatgcaagtctcatgaatcatttcccagcaataaatttatcttctgtgaagggccctgcaaaagggcatatcatgagaaatgtttggaacctcccttaaacaaaagcgtacttccaacaagtagccatggatggctttgcaaattctgtttgtgcaaagtgaaaattttagaaactattaatgcacatctaggaacaagttttacagtgaagtgccccttcgaagatatattcaaggaagcaacggaacaaatagactccgaggatgcactagatgaagattggctttctgagtattcaggtgatgaggactatgatcctgatgaaaatgaggacagcggcaactgtatggacagcggggaggaaattatgtctgatgattccgatggttcaggaagccccctttattctccaaatgacgatattcctgacttcatatcagcagacttaaatgacgtggaagggttttgtcacaccaatttagacttaggcattgatgccgttgaagatgatttggcacagatccttacctaccaaaggccaagaagagatgttgattatagaaggcttaatgaggaaatgtttggaaaaataataggaaatgaaggacagagtgaggatgaagattggggccatgaaaggagaaagaaaaggacttgttcaggtggtgctggggataattctgtgggtttctcaaatgttatatctgaggaaaagagccaaaagaaggggagaaaacttttcaggattcctcctgcagctgtcgaggtacttcgcaaagcttttgctgaaaatgagcttccaccccgggatgtcaaagaaaatctctcaagagaattgggaatttcttttgaaaagattgataaatggttcaaaaatacacggtgtgctgctctcagagatcgcaaggctgaagggaacagtcataatacggctcccagcaaaagctcaagaaataaaggaaaagctggaatctcaagccaggctgaaaggaatggtcatgttactggtccctgcaataactcgagaacaaatgaagaaaaatcgttgacactagctcctaatgcccagggagagaagaatgggattgcagcagattatgtcttacaaaaatctggtatatcggggaaggttgattcagtagacaactcttgcttggttcccttgtctgaaagcatcaatgtgcatacacgattgcaacagaatcttgagatgaggaagatggaatcaactagcagtcctgtgtggctgcacaataaaggaggttgcttgtttccaacaggccaagccaaggagagtacattacctacaggcaagccttgtttgcagtcagaaataacccattcaacaattaatgaagtgagcactttagtgcaagctacttcttggatggatgctgggtcgtgcgctgaggtgcaagaagccactccttgggtggacatcggggcctcagattaccagcctttcctggacgtgatcgatgagatgtgcggacttgagtgcaggctgcagagactgaaggagaacatgctctcatctggcatagacggcaaaaccacaggtgagagtgacatgggaaaccaggctgtggtgctcgtgccgaccgccgagctcaaggaaaaagcgccgcatggcagtttttttgggcattattgcccatag

SEQ ID NO: 192 - protein, 751 aa, Saccharum officinarum
MHSSENKLVCSNSGRSSKGNETSMELVPVPKRPTRHDASRQCKSDSPLKRSPRKARNATLAKSIKNKYHCSPLKQRRASDSVSGKVATGLTVRRRKKRKMQNTDEATRLERRARYFLIKIKLEQNLLDAYSGDGWNGQSREKIKPDKDLRRARKQIIKCKIAIRDIIRQLGLYTSTGSLNDPAMPPDQSTNPEHTMCSTCKSHESFPSNKFIFCEGPCKRAYHEKCLEPPLNKSVLPTSSHGWLCKFCLCKVKILETINAHLGTSFTVKCPFEDIFKEATEQIDSEDALDEDWLSEYSGDEDYDPDENEDSGNCMDSGEEIMSDDSDGSGSPLYSPNDDIPDFISADLNDVEGFCHTNLDLGIDAVEDDLAQILTYQRPRRDVDYRRLNEEMFGKIIGNEGQSEDEDWGHERRKKRTCSGGAGDNSVGFSNVISEEKSQKKGRKLFRIPPAAVEVLRKAFAENELPPRDVKENLSRELGISFEKIDKWFKNTRCAALRDRKAEGNSHNTAPSKSSRNKGKAGISSQAERNGHVTGPCNNSRTNEEKSLTLAPNAQGEKNGIAADYVLQKSGISGKVDSVDNSCLVPLSESINVHTRLQQNLEMRKMESTSSPVWLHNKGGCLFPTGQAKESTLPTGKPCLQSEITHSTINEVSTLVQATSWMDAGSCAEVQEATPWVDIGASDYQPFLDVIDEMCGLECRLQRLKENMLSSGIDGKTTGESDMGNQAVVLVPTAELKEKAPHGSFFGHYCP

SEQ ID NO: 193 - DNA, 2181 bp, Vitis vinifera
atgcgtggaactggaaagaaagcaggacatcaggaatctggaaagtcttgctttcctaaaagaaatatcgggcctaagctgaatgcagcattgcagattaaaaatggtagtaaaatatctcagaccaggaaatgcaagccaaaatcaaaatctcatgcaaagacaattggtgcaatcctgtctaagagaacaactactgactctccaagcaagggaagcaggagtggatccacaaccagaaaactgattcacaagaaaaccctgcataaagccattgatactgagtcttccaagaaggagtcttcatcaaagcttaaaggtgagaagcccccacaaattagcacaaacaaaaatggggaaactgtggacaagaatgttaaacctcaaaaattaaagaaaagaggaaagcggaagcggcgaaaggataattcagagctagatgaagcttctcgcttgcaaagaagaaccaggtacctcttgatcaaaatgaaactggagcagaatcttattgatgcttactctggggaaggttggaaaggtcatagtcgagaaaagatcaggccagagaaggaactacaaagagctacgaagcaaatattgaaatgtaaacttgggatccgtgatgcaattcgccagctggagtcactgagctccataggatgtattgaagatactgcaattgcttcagatggatctgtttatcatgaacacataatctgtgcaaagtgcaagttgcgggaggctttcccagataatgatattatactctgtgatgggacgtgcaattgtgctttccaccagaaatgtcttgatcctccattggaaactgaaaatattcctccgggagaccaaggttggttttgcaagttctgcgagtgtaagatggaaatactagaagcaatgaatgcacatcttggaacccgcttctctgtggacagtacttggcaggatattttcaaagaagaagctgctttgcctgatggtgggagtgcactgccctatccagaggaagattggccttctgatgattcacaagatcatgattatgatcctgaaagaaatgaaaatagctgcagcatcagcactgctggcactgaaggaaatgcttcagatgatacaaatagttctttaagcttgagttggtcgtttgaagacgaaatcctttctggatccaaaagatcagggattatcagtgcagattctgatgaaacatctgattgtgaaatcataagtggtcgtaggcaacgaagagctgttgattatagaaagttatatgatgaaatgtttggaaaggatgctcatgcaaatgaacaagttagtgaagatgaagactggggtcctgctaacaaaaggcggagagaaaaggagtctgatgcagccagcaccctcataactctatatgaaggtgagaaaaagttacctaatgtggaaaccatggaagccaaacaaaaaatttcttcagatccacaaactaaaaggccattttccagaattccacttgatgcggttgagaagcttcgccaagcatttggggagaatgaacttccctctagagatgtgagggagaatcttgcaaagcagttgggtcttgattatgagaaggtgaacaaatggttcaaaaatgcacgatatatagcgctaaaaacaagaaaggcagaaagagcaaaacaacttcagacttctcccagaatctccaaggaatccagatcagaaatcgtgaaggacaaaactgttgatctagtggcatcaagggataactcatcagcatcactggtccgtgcactaaagaatttgaaaaaggtgcggaggagaaaaaatccaaagccaataatgaccagccctgtaaagaaaaagcatcatagaagggctttacttgagtcacctacaaatgacaaggttactatggagtttgacgatgatgtgagcttgaagaaacaactgaagcttttgaaagaaaaaagtaagagggacaagcaaagggtcgacttcaaggagggaactggtgtacaagatgcagagaaggagatggagagactctgccaaattaaggataagatagagaagttgaagcaggtaatactgagacttcaatgtgacaaaactaatcaatggcaagaccagtcagtgatctatgttcctgtggcagagctaagggagaaaggtcgattttgcatcacatct

SEQ ID NO: 194 - protein, 727 aa, Vitis vinifera
MRGTGKKAGHQESGKSCFPKRNIGPKLNAALQIKNGSKISQTRKCKPKSKSHAKTIGAILSKRTTTDSPSKGSRSGSTTRKLIHKKTLHKAIDTESSKKESSSKLKGEKPPQISTNKNGETVDKNVKPQKLKKRGKRKRRKDNSELDEASRLQRRTRYLLIKMKLEQNLIDAYSGEGWKGHSREKIRPEKELQRATKQILKCKLGIRDAIRQLESLSSIGCIEDTAIASDGSVYHEHIICAKCKLREAFPDNDIILCDGTCNCAFHQKCLDPPLETENIPPGDQGWFCKFCECKMEILEAMNAHLGTRFSVDSTWQDIFKEEAALPDGGSALPYPEEDWPSDDSQDHDYDPERNENSCSISTAGTEGNASDDTNSSLSLSWSFEDEILSGSKRSGIISADSDETSDCEIISGRRQRRAVDYRKLYDEMFGKDAHANEQVSEDEDWGPANKRRREKESDAASTLITLYEGEKKLPNVETMEAKQKISSDPQTKRPFSRIPLDAVEKLRQAFGENELPSRDVRENLAKQLGLDYEKVNKWFKNARYIALKTRKAERAKQLQTSPRISKESRSEIVKDKTVDLVASRDNSSASLVRALKNLKKVRRRKNPKPIMTSPVKKKHHRRALLESPTNDKVTMEFDDDVSLKKQLKLLKEKSKRDKQRVDFKEGTGVQDAEKEMERLCQIKDKIEKLKQVILRLQCDKTNQWQDQSVIYVPVAELREKGRFCITS

SEQ ID NO: 195 - DNA, 2166 bp, Zea mays
atgcattcttcggaaaataaactgggttggaatgagacctctatggggttggttcctgtaccaaaaagaccagctagacctgatgcttcccaccaatgcaaatctgattcctttatgaagcgatcaccaaggaaagttagaaatgctactctggcaaaaagcataaagagcaaataccactatagtcccctcaaacagcggaagggttcagattctgttcctgggaaaatcgtaacaggactaaccgcaaggaaaaagaagaaaaggaaaatccaaattacagacgaggcaactcgtttggaacgaagagcgagatattttctaatcaagataaaactggagcagaatttgctagatgcttactctggagatggatggaatgggcaaagccgagagaaaataaagccagagaaggaactgcaacgtgccaggaaacaaatcataaaatgcaaaattgctatacgtgatatcatccgccaacttgatttgtatacttctactgggagtgttgatgacccactaatgcctacagatcagtccaccaatcccgaacataccatgtgctcaacatgcaagtctcatgaatcatttcccagcaataaaattatcttctgcaaagggccctgcaaaagggcatgtcatgagaaatgtttggaacctcccttaaacaaaagcgtacttccaacaagtagccatgggtggctttgcaaattctgtttgtgcaaggtgaggattttagaaactattaatgcacatctagggacgagttttacagtgaagtgccactttgaagatatattcaaggaaactactgaactaatagactctgaggatgcactagatgaagattggctttctgagtattcaggtgatgaggactatgatcctgatgaaaatgaggccagtggcgactgtatggacagcggggagaagattatgtctgatgattccaatggttcaggaagccccctttattctccaaatgacgatattcctgacttcatatcagcagacttaaatgttgtggaagggttttgtcataccaatttagatttaggcattgatgccgttgaagatgattttgcacagatcctcacctaccaaaggccaagaagagatgttgattatagaaggcttaacgaggaaatgtttgggaaaataaccgggaatgaagaacagagcgaggacgaagattggggccatgaaaggagaaagaaaaggacgcattcaggtgttgctggggataattctgttggtttcttgaacgttatatctgatgaaaagagccagaagaaggggagaaaacttttcaggattcctcctgcagctgttgaggtacttcgcagagcttttgctgaaaatgagcttccaccccgggatgttaaagaaaatctctcaagagaattgggaatttcttttgaaaagattgataaatggttcaaaaatacacggtgtgctgctctcagagatcggaaggctgaaggaaacagtcataatacagctcccagcaaaagctcaaaaaataaaggaaaagctggaatctcaggcaagactggaaggaatggtcatgttactggtccctgcaataatttgagaacaaatgaagaaaaaacaggtatatcggggaagtttgattcaggagacaactcttgtttggttcccttctctgaagtcatcaatgtgcctacgcgattgccacacaactttgagatgaggaagatggaatcaactagaagtcctgcgaggctacacaataaaggagggttcctgtctgcaacagtccaaattaaggagagtacgttgttacccacaggcaagccttgttggcagtcagaaatgagccatccaacaactaatgaagtgagcacttcagcgcaagctactacttggatcgacgcgggggcgtgtgccgaggagcaagaacctactccttgggtggacatcggggtctcagactaccagcctttcctggatgtgatcgacgacatgtgcggacttgagtggaggctgcagagactgaaggagaacatgctctcatctagcatagacggccaaaccgccgccagtgagagtgacaaaagaaaccagaccgtggtgctagtgccaaccgccgagctcaaggaaaagctgccgcatgacggtttattcgggcattattgcccatag

SEQ ID NO: 196 - protein, 721 aa, Zea mays
MHSSENKLGWNETSMGLVPVPKRPARPDASHQCKSDSFMKRSPRKVRNATLAKSIKSKYHYSPLKQRKGSDSVPGKIVTGLTARKKKKRKIQITDEATRLERRARYFLIKIKLEQNLLDAYSGDGWNGQSREKIKPEKELQRARKQIIKCKIAIRDIIRQLDLYTSTGSVDDPLMPTDQSTNPEHTMCSTCKSHESFPSNKIIFCKGPCKRACHEKCLEPPLNKSVLPTSSHGWLCKFCLCKVRILETINAHLGTSFTVKCHFEDIFKETTELIDSEDALDEDWLSEYSGDEDYDPDENEASGDCMDSGEKIMSDDSNGSGSPLYSPNDDIPDFISADLNVVEGFCHTNLDLGIDAVEDDFAQILTYQRPRRDVDYRRLNEEMFGKITGNEEQSEDEDWGHERRKKRTHSGVAGDNSVGFLNVISDEKSQKKGRKLFRIPPAAVEVLRRAFAENELPPRDVKENLSRELGISFEKIDKWFKNTRCAALRDRKAEGNSHNTAPSKSSKNKGKAGISGKTGRNGHVTGPCNNLRTNEEKTGISGKFDSGDNSCLVPFSEVINVPTRLPHNFEMRKMESTRSPARLHNKGGFLSATVQIKESTLLPTGKPCWQSEMSHPTTNEVSTSAQATTWIDAGACAEEQEPTPWVDIGVSDYQPFLDVIDDMCGLEWRLQRLKENMLSSSIDGQTAASESDKRNQTVVLVPTAELKEKLPHDGLFGHYCP

SEQ ID NO: 197 - DNA, 2172 bp, Arabidopsis thaliana
atgtataaagcagtaagtaagcgggtaactagaagtagtggatctggtttgaagcagacaaatgtagataatggaggagagattagtccaactgttgacagagtatctgaacaaggcaaatcatcagaggcagggagtcacatgccaactgatgcaaacggaaatggacatttgcatcatgagattatggatcatggaaaggggaatgaagaacagaaaccaacccctcaaaccgtgaagaaggattctaataccaataccaaattttcagggtctcatcgtgagcttgtcatcggtcttccttgccgtggacaatttgaaatccacaaccggtccagggcatctacgagttcgaagaggttaggaggaggtggagaaaggaatgtgttgtttgcaagtcacaagagagctcagagatctaaggaagatgctggaccatcttcggttgttgctaattccacacctgtaggtcgaccaaagaaaaagaataagactatgaacaaaggacaagttagagaagatgatgagtacacaagaatcaaaaagaaacttcgatactttctaaaccggattaactatgagcaaagcctaattgacgcctattcgttagaaggctggaaaggttcaagcctggaaaagataaggccagagaaagagcttgaacgagccacaaaggaaattttgcggcgcaagcttaaaattagagatctttttcagcaccttgacacactctgtgctgaaggaagccttccagagtctttatttgatactgatggagagatttctagcgaggatatcttctgtgcaaaatgtggttcaaaggacttgtctgttgataatgatatcatactatgcgatgggttttgcgatcgaggctttcaccaatactgtcttgaaccacctctgcggaaagaagatattcctccggatgatgagggttggctatgccccggatgtgattgcaaagatgacagcttggacttgcttaatgattctttagggacaaaattttcggtcagcgacagttgggagaaaatatttcctgaggcagcagcagcgctggttggtggaggtcaaaatcttgactgtgatcttccttcagatgattctgatgatgaagagtatgatccagattgtttgaatgataatgaaaatgatgaagatggcagtgatgacaatgaagaatctgagaacgaagatggtagttctgatgaaactgaattcacatctgcatctgacgaaatgattgagtcatttaaagaagggaaagatataatgaaagatgtaatggcccttccatctgatgattctgaggatgatgactatgatcctgatgccccgacttgtgatgatgataaagaaagttcaaattctgattgtacatcagacactgaagatcttgaaacttccttcaaaggagatgagactaatcagcaagctgaagatacaccacttgaggatcctggcagacagacgtctcagctccaaggtgatgcaattttagagtcagatgttgggcttgatgatggtcctgccggtgtatccagaaggaggaatgttgaaaggctggattacaaaaagttgtatgatgaggaatatgacaatgttccgacttcgtcaagtgatgatgacgattgggataaaactgcaagaatgggaaaagaagattccgagtcggaagatgaaggggacactgtacctctgaaacagtcttcaaatgcagaagatcatacttctaagaaacttatacggaagtcgaaaagggcagataaaaaggataccttagaaatgccacaagaaggtcctggagaaaatggtggttctggtgaaattgaaaaaagcagctcttcagcatgtaaacagacagatcccaaaactcagagactgtacatatcttttcaagagaatcaatatccagacaaagccacgaaggagagcttagccaaagagctacaaatgacagttaagcaagttaataactggtttaagcataggcgttggtcgataaacagcaaacctttagtttcagaggaaaatgtcgagaagttaaaaacaggcaaggaaggtgaatgtgagacatctgttgctggaagtagcaaacaaactatggaaaccgagtcagttgcagagaaaccaaccaatactggatcacggaaaagaagaagaaagtag

SEQ ID NO: 198 - protein, 723 aa, Arabidopsis thaliana
MYKAVSKRVTRSSGSGLKQTNVDNGGEISPTVDRVSEQGKSSEAGSHMPTDANGNGHLHHEIMDHGKGNEEQKPTPQTVKKDSNTNTKFSGSHRELVIGLPCRGQFEIHNRSRASTSSKRLGGGGERNVLFASHKRAQRSKEDAGPSSVVANSTPVGRPKKKNKTMNKGQVREDDEYTRIKKKLRYFLNRINYEQSLIDAYSLEGWKGSSLEKIRPEKELERATKEILRRKLKIRDLFQHLDTLCAEGSLPESLFDTDGEISSEDIFCAKCGSKDLSVDNDIILCDGFCDRGFHQYCLEPPLRKEDIPPDDEGWLCPGCDCKDDSLDLLNDSLGTKFSVSDSWEKIFPEAAAALVGGGQNLDCDLPSDDSDDEEYDPDCLNDNENDEDGSDDNEESENEDGSSDETEFTSASDEMIESFKEGKDIMKDVMALPSDDSEDDDYDPDAPTCDDDKESSNSDCTSDTEDLETSFKGDETNQQAEDTPLEDPGRQTSQLQGDAILESDVGLDDGPAGVSRRRNVERLDYKKLYDEEYDNVPTSSSDDDDWDKTARMGKEDSESEDEGDTVPLKQSSNAEDHTSKKLIRKSKRADKKDTLEMPQEGPGENGGSGEIEKSSSSACKQTDPKTQRLYISFQENQYPDKATKESLAKELQMTVKQVNNWFKHRRWSINSKPLVSEENVEKLKTGKEGECETSVAGSSKQTMETESVAEKPTNTGSRKRRRK

SEQ ID NO: 199 - DNA, 2901 bp, Lotus japonicus
atgattagttcaactggagaattgacaagccataacaacagtagcattgagcacatggaaactgagcaacctgaattgtctgaaaaaacacctcagataggctctgaatgtctggacggtgaacaaagggtgcttggtactgtgtcaaccagttctgttaataatgaaaattcaaatcaagtttctgccaatgtgaccgagaattctgtttttcaactaccagcaacacctcaacattgcttagaaaagagtggtcagactgtaacaagtccacccctggaagaaagcaccttgaaacaagttgctactaatgtatctaatggtaaatcagaaaacaaatgtcagacatcctctcaagatgttcaaaacgaacttgtggaagcaagtgatgtaataactggctcttttgttgcggaccaaacacaatccattcctgctcaagtgaatacgagttctgtgaatgaactattggatattccttccggagatgttgcagtagaagttggttctgatagtttagaaaaaaagtctaaagggtgcttggtagacagcgaacaaagggtacttggtactgtgttaaccaattctattaatgatggaaattcaaatcaagtttctgccaatgtgaccgagaattctgttattcaactgccagcaccacctcaacattgctttgaaaagagtggacagactgtaaaaagttcatctctggaagaaagtaccttaaaacaagtctccactaatttatctaacagtaaatcagaaaacatatgtcagacatcctctcaagatgttcaaaacgaacttgtggaaacaagtgatgcagtaactggctctgttgttgcagacaaaacacaatccattcctgctcaagtgaatacaagttctgtgaatgaactattggatattccttccagagatgttgcagaagaagttggttctgatagttcagaaaggaagtctaaaagcacaactccttcacaattgagacatataggtaaaagtaactcaaagttatcgaaaaagaagtatatcctaaggtcgttaggaagcagtgacagagctttgcggtccaggacaaaagaaaaacctaaagcgcctgaaccaagtagtaactcagttgacgttaataatgatggagtgaagaaggaaaaaaggaggaagaagaaaaaaacaggaggggaggaaaagaaggatcaattttataaaatcaaagctcacctaagatatttattaaacagagtaagctatgagcaaaacttaattgatgcttactctggtgacggctggaaaggatacagtatggacaagttaaagcctgataaggagattcaacgggctaaatctgaaattcttcgacgtaaattgaaaattagggatctatttcaaaacttggattccttgtgtgctgaaggaaagtttccagaatctttgtttgattctgagggagagattgacagtgaggatatattctgttcaatttgccagaccaaagagttgagcactgataatgatataattctctgtgatggtgcttgtgaccgtggatttcaccagcactgcttggatcctccattgttaactgaagacattccacctggcgatgagggttggttatgccccggatgtgattgcaaagatgactgcgttgaccttcttaacgactccttaggaacacgtctctctcttagtgacacctgggagaaggtttttcctgaagcagcagctgttactggaaataatatggatcagggacttccttctgatgattctgatgatgatgattataaccctaatggtaaagaggatgtggaggttgaaggaggtgaatcaagttctgatgaatctgaatatgcttctgcttctgagaaattggaagattcacaccatgaggatccatacttaggccttccttctgaagattcagaggacaatgattatgatcctagtgctccagatcttgacaataaagtcacagaagaaagttcaagctctgatttcacatctgactctgaggatcttgctgctgctattgaggataacacgtcccctggacatgttaaacagactaaaagcagacaaaaaagtaaagttggtaagaacccatcaatggttgatgaagtgtcatctttacgagagccagaacttgaggaagagggtttcactccagtttctgggaaaagaaatgtggaaaggctggactacaaaaagctgtatgatgagacatacaaaagtgatactagtgaagatgaagaatggactgccagtgccactccaagtagaaaaaagaaactctgtggcaaaatgactccagtgtcatcagatggaaaggcctcaaataattctagacatactcctgaaaggaacacccaacaagataaagttgaaaatacaaataattcacccactaaatcacttgaaggctgtctggaatctggctcaagggataaaaagcctaggtcttcaacacgtcaaagacttggagacgttgtagtgcagagacttcacaaatcttttaaagacaatcagtatccggatcgagccacaaaagaaagcttggcagaagaactggggctcacttttttccaggttgacaaatggtttggcaatgctcgatggggctttcggcgttcatcgcgtatgggagctagtccaggcgaatatgcttcgccacaggccactggcagcggacctgaaaatactggggagagggaacgcgaattagcttcccaggaagtcggtgaagaaaaattgaaaacccccagtcctagaaaaaggaagcatttgtctgaaccgcaggcatctgaagcaccgcagattattgttcttggcttagcagcatctcctggctcaccacgggctcatgcaggcaataaaaagaagacagtgaaaaggaaatga

SEQ ID NO: 200 - protein, 966 aa, Lotus japonicus
MISSTGELTSHNNSSIEHMETEQPELSEKTPQIGSECLDGEQRVLGTVSTSSVNNENSNQVSANVTENSVFQLPATPQHCLEKSGQTVTSPPLEESTLKQVATNVSNGKSENKCQTSSQDVQNELVEASDVITGSFVADQTQSIPAQVNTSSVNELLDIPSGDVAVEVGSDSLEKKSKGCLVDSEQRVLGTVLTNSINDGNSNQVSANVTENSVIQLPAPPQHCFEKSGQTVKSSSLEESTLKQVSTNLSNSKSENICQTSSQDVQNELVETSDAVTGSVVADKTQSIPAQVNTSSVNELLDIPSRDVAEEVGSDSSERKSKSTTPSQLRHIGKSNSKLSKKKYILRSLGSSDRALRSRTKEKPKAPEPSSNSVDVNNDGVKKEKRRKKKKTGGEEKKDQFYKIKAHLRYLLNRVSYEQNLIDAYSGDGWKGYSMDKLKPDKEIQRAKSEILRRKLKIRDLFQNLDSLCAEGKFPESLFDSEGEIDSEDIFCSICQTKELSTDNDIILCDGACDRGFHQHCLDPPLLTEDIPPGDEGWLCPGCDCKDDCVDLLNDSLGTRLSLSDTWEKVFPEAAAVTGNNMDQGLPSDDSDDDDYNPNGKEDVEVEGGESSSDESEYASASEKLEDSHHEDPYLGLPSEDSEDNDYDPSAPDLDNKVTEESSSSDFTSDSEDLAAAIEDNTSPGHVKQTKSRQKSKVGKNPSMVDEVSSLREPELEEEGFTPVSGKRNVERLDYKKLYDETYKSDTSEDEEWTASATPSRKKKLCGKMTPVSSDGKASNNSRHTPERNTQQDKVENTNNSPTKSLEGCLESGSRDKKPRSSTRQRLGDVVVQRLHKSFKDNQYPDRATKESLAEELGLTFFQVDKWFGNARWGFRRSSRMGASPGEYASPQATGSGPENTGERERELASQEVGEEKLKTPSPRKRKHLSEPQASEAPQIIVLGLAASPGSPRAHAGNKKKTVKRK

SEQ ID NO: 201 - DNA, 2379 bp, Oryza sativa
atggataagacaactacttctgatcttgttttggacaacgacaacattgggagtaatgctggttctgcacaggagcctcttactaccaatggtaagactagtggggtcagaaatagatacaaacaaactgttaaaaggggaaggaaaggctcccaaatatcaccaagtaaaacatatcccctgagatcttcacatagtaatgtcagggtgcttcgctctgcctcaaaaaagaagaatgagacacctattgtgcccacaaatgataatactgctgttcaacgagttgcgaagaaaaggaaaagaagcaaacccttgagacctgcacctagcagggtgcttcgctctacctcggaaaagaagaataaggcacataatgagcttctaaatgatggtgctggtgttcaaccagccgaaaagaaaagaaaggtaggcagacccccaaaaggaggaactcccaaggacgattacctcatgatccgaaagcgagttagatatgttttgaatcgaatgaactatgaacaaagtttaattcaagcctatgccagtgaaggttggaaaggtcaaagcttggaaaaaataagacctgagaaggagcttgaacgagccaaggtggaaattctgcgatgcaagtcaagaatacgggaagcttttcggaatttggattccctcctatctgagggaaagctggatgaatctatgtttgattctgctggagaaatatctagtgaagatattttctgtgctgcatgtggttcaaaggatgttacattaaaaaatgacataattctttgtgatggaatctgcgacagagggttccaccagtattgtttaaaccctcctttgcttgctgaagatattccacagggggatgaaggatggctttgccctgcatgtgattgcaaaattgactgcatagatgtattaaatgaactccaaggggtcaaactctctatccatgactcttgggagaaagtttttcctgaggcagcatcctttttgaatggttctaagcaaattgatgcgtccgatcttccatcagatgattcagcagacaatgattatgaccctactttggctcaagggcacaaggtggatgaagaaaaatcttctggagaagatggtggtgaaggattagattctgatgactcatcttctgaggattctgaatcttctgagaaggaaaagtctaaaacttcacagaatggaaggacagttgatgatcttggtttgccttctgaggattcagaggatggtgactttgatccagcaggtccagattccgacaaagaacaaaatgatgaatcaaactcagatcagtcagatgaatcagattttacatctgactctgatgatttttgtgctgagattgctaaatcctgtggtcaggatgaaatctcaggcccttcatcatcacaaatcagaacagtcgatcgcaccgatggaagtggttttgatggtgagcctaatgcagaaaattcgaatcttgcatttatggagacagagctagagcaagacatggtgctaccaatttctagtaaacgacaagttgaacgtttggattacaaaaaactgtataatgaggcttatggtaaagcatcatctgattcaagtgacgatgaagagtggtatggaaatagtacacccgaaaaaggtaatttagaagacagtgaaacagattcgcttgctgaatcacctcagggtggaaaaggattctctagaagagcaccagttaggtaccataataatgaacatactccacagaatgtaaggcccggtggttcagtaagcgaccagcaaactgaagtactttgctccaatagcaatggtagcacagccaaaaacagacattttggtcctgcaattaatcagaaactgaaggcacatttcaaggaagatccataccctagtcgtgcaacaaaagaaaatctggcacaagagttaggcctcacatttaatcaggtcactaaatggttttccagtactcgtcattacgcaagagtggcagccacaaaaaaggagaacaacattgaaaatcatacggctgagaataataacaataccaacactgttgatagcatacaactgagaggatccaatgatattgttagtgtagatagaaatgatatggtctccgaggaaaggacaggacaaagtaatctcaatgaaggtactccattaagatcagataccagctgtgggcagagtgtggctgtgactcctatggtacacccagaaaaccagggcaatgattcctcaagtaatgttagaacaccaaatgctaagtctgcggagaaattgatccctggactggaaaattcagatgaggctaggcgaaaggcggtacaacgggaactgagaaagatgaagactggcaggtga

SEQ ID NO: 202 - protein, 792 aa, Oryza sativa
MDKTTTSDLVLDNDNIGSNAGSAQEPLTTNGKTSGVRNRYKQTVKRGRKGSQISPSKTYPLRSSHSNVRVLRSASKKKNETPIVPTNDNTAVQRVAKKRKRSKPLRPAPSRVLRSTSEKKNKAHNELLNDGAGVQPAEKKRKVGRPPKGGTPKDDYLMIRKRVRYVLNRMNYEQSLIQAYASEGWKGQSLEKIRPEKELERAKVEILRCKSRIREAFRNLDSLLSEGKLDESMFDSAGEISSEDIFCAACGSKDVTLKNDIILCDGICDRGFHQYCLNPPLLAEDIPQGDEGWLCPACDCKIDCIDVLNELQGVKLSIHDSWEKVFPEAASFLNGSKQIDASDLPSDDSADNDYDPTLAQGHKVDEEKSSGEDGGEGLDSDDSSSEDSESSEKEKSKTSQNGRTVDDLGLPSEDSEDGDFDPAGPDSDKEQNDESNSDQSDESDFTSDSDDFCAEIAKSCGQDEISGPSSSQIRTVDRTDGSGFDGEPNAENSNLAFMETELEQDMVLPISSKRQVERLDYKKLYNEAYGKASSDSSDDEEWYGNSTPEKGNLEDSETDSLAESPQGGKGFSRRAPVRYHNNEHTPQNVRPGGSVSDQQTEVLCSNSNGSTAKNRHFGPAINQKLKAHFKEDPYPSRATKENLAQELGLTFNQVTKWFSSTRHYARVAATKKENNIENHTAENNNNTNTVDSIQLRGSNDIVSVDRNDMVSEERTGQSNLNEGTPLRSDTSCGQSVAVTPMVHPENQGNDSSSNVRTPNAKSAEKLIPGLENSDEARRKAVQRELRKMKTGR

SEQ ID NO: 203 - DNA, 3267 bp, Petroselinum crispum
atggaagagatctcagaccctaaaccaaatgcattagagcaagtacttcctactgtcccaaatggtaaatgtactgcaccggtgcaaatggaaagtttggctgttgatgttcaaaaagtatcaggtgaagcaaaggtgaggatatgttcctgttggtgcgagatagtacgttctccagaagatttaactaaacttgtgccttgtaatgattttgcagaagatataaaattgtttgattctgatcccatgcaacaagaagctgaaagctccattggaataccattgatccctaaacaagttacaatgtcccataaccatgaccatgaatctggttctgaaatggtcagtaacgaagtaatgcaagaaaaccatgtaattgccacagaaaatacttaccagaaatctgattttgaccgtataaatatgggacaaaaagaaaccatgccagaagaagtgatccataagtctttcttggaatcctcaacttcctcgatagatatactattaaataatcataacagttatcaatcaggactgccaccagagaatgcagtaacagattgcaagcaagtccaattgggacaccgaagtgatgatgctataaagaattctggtcttgtggaattggtaataggtcagaaaaatgttgccaagagtcctagccagttggtagaaacggggaaaagaggtcgtggtcggcccaggaaagtacaaactggccttgagcaattggtaataggtcagaaaactgctgccaagagctctagccagttaggtgacacagggaaaagatctcgtggtcggcccagaaaagtacaaaattctccaacttctttcttggagaatataaatatggaacaaaaagaaacaataccagaacaagtgacccaaaattctatcttggagtccttgactatcccgacagacaatcagtcaagaacttataacagtgatcaatcagaactgccaccagagaatgcagcaaaaaattgcaatcacgcccaatttggacatcaaagtgatgatactacaaagatttctggattcaaggaattggtaataggtcaggaaacagttgcaaagagtcctagccagttggtagacgcaggaaaaagaggtcgtggtcggcccagaaaagtacaaactggtcttgagcaattggtaccagttcaggaaactgcggccaagagctctagccagttgggagacacagggaaaagatctcgcggccggcccaggaaagtacaagattctccaacttctttagggggtaatgttaaagtggtaccagagaaaggaaaagattctcaggaattgtcggtaaacagcagcagatcattgcgctcaaggtcacaagagaaatctatcgaacccgatgtcaataatattgtggcagatgaaggtgctgacagagaaaaaccaaggaagaagaggaaaaagcgaatggaggaaaatagggttgatgaattctgtagaataaggacacacctaaggtacttactacacagaataaaatacgagaagaatttccttgatgcttactctggggagggatggaagggacaaagcctagacaaaataaaacctgagaaggagcttaaacgagcaaaagctgaaatttttggacgcaaattgaaaattagagatctatttcagcgcttagatttagcacgttccgagggaaggcttccagaaattctatttgattctcgaggagaaattgacagcgaggatatattctgcgcgaaatgtggatccaaggatgtgacactcagtaatgatatcatcctttgcgatggtgcatgtgatcgtggatttcaccaattttgtttggacccaccattgctgaaagaatatattcctcctgacgacgagggttggctttgcccgggatgcgagtgcaaaattgactgcatcaagttacttaatgattcccaagagacaaatattttactcggtgacagctgggagaaagtttttgctgaggaggcagcagcagcagcttccggaaaaaatctagatgataattctggactgccttcagatgattccgaggatgatgattatgatcctgggggccctgatttggatgagaaggtgcagggagatgattcgagtacggatgaatctgattatcagtcggaatcagatgatatgcaagttatacgtcaaaaaaattcgcgcgggcttccttcagatgattccgaagatgatgaatacgatcctagtggcttagttactgatcagatgtataaggacagctcatgttctgattttacatctgattctgaggattttacaggtgtgtttgacgattataaggatactggtaaagctcaagggccactggcatcgaccccagatcacgtcaggaacaatgaggaagggtgtgggcatcctgagcaaggtgatactgcccccctgtatccgagaagacaagtagagagtttggactacaaaaagctaaatgatattgagttctctaaaatgtgtgacatccttgatattctttcaagtcaacttgatgtaattatttgtactggtaaccaggaagagtatgggaacacatcttctgattcaagtgatgaagattatatggttacttcttcaccagataaaaataattctgataaagaagctacagcaatggagcgtggaagagagagcggtgatttggagctagaccaaaaagcgagagaatccactcataataggagatatataaagaagtttgctgttgaaggcacagattcttttctttctagatcgtgtgaagactctgcagcacctgttgctggtagtaaaagtacttcaaaaacattgcacggggaacatgcaactcagagactcctccaatccttcaaggaaaatcaataccctcaacgagctgtgaaagagagtttggctgcagaattagcactttcagtccgacaggttagcaactggtttaataatagacgttggagctttcgccactcatcacgtattggatcggatgtagctaaatttgattcaaacgatactccccgtcagaaaagcattgacatgtctggacccagcttgaaatcggtcttggacagtgctacttacagtgaaattgaaaagaaggaacaagatacggcaagccttggtttgacagaaggttgtgacagatacatgacgctgaatatggttgcagatgaaggcaatgtgcacactccttgtattgcagaaactagggaagaaaaaaccgaagtcggtataaagccacaacagaacccactataa

SEQ ID NO: 204 - protein, 1088 aa, Petroselinum crispum
MEEISDPKPNALEQVLPTVPNGKCTAPVQMESLAVDVQKVSGEAKVRICSCWCEIVRSPEDLTKLVPCNDFAEDIKLFDSDPMQQEAESSIGIPLIPKQVTMSHNHDHESGSEMVSNEVMQENHVIATENTYQKSDFDRINMGQKETMPEEVIHKSFLESSTSSIDILLNNHNSYQSGLPPENAVTDCKQVQLGHRSDDAIKNSGLVELVIGQKNVAKSPSQLVETGKRGRGRPRKVQTGLEQLVIGQKTAAKSSSQLGDTGKRSRGRPRKVQNSPTSFLENINMEQKETIPEQVTQNSILESLTIPTDNQSRTYNSDQSELPPENAAKNCNHAQFGHQSDDTTKISGFKELVIGQETVAKSPSQLVDAGKRGRGRPRKVQTGLEQLVPVQETAAKSSSQLGDTGKRSRGRPRKVQDSPTSLGGNVKVVPEKGKDSQELSVNSSRSLRSRSQEKSIEPDVNNIVADEGADREKPRKKRKKRMEENRVDEFCRIRTHLRYLLHRIKYEKNFLDAYSGEGWKGQSLDKIKPEKELKRAKAEIFGRKLKIRDLFQRLDLARSEGRLPEILFDSRGEIDSEDIFCAKCGSKDVTLSNDIILCDGACDRGFHQFCLDPPLLKEYIPPDDEGWLCPGCECKIDCIKLLNDSQETNILLGDSWEKVFAEEAAAAASGKNLDDNSGLPSDDSEDDDYDPGGPDLDEKVQGDDSSTDESDYQSESDDMQVIRQKNSRGLPSDDSEDDEYDPSGLVTDQMYKDSSCSDFTSDSEDFTGVFDDYKDTGKAQGPLASTPDHVRNNEEGCGHPEQGDTAPLYPRRQVESLDYKKLNDIEFSKMCDILDILSSQLDVIICTGNQEEYGNTSSDSSDEDYMVTSSPDKNNSDKEATAMERGRESGDLELDQKARESTHNRRYIKKFAVEGTDSFLSRSCEDSAAPVAGSKSTSKTLHGEHATQRLLQSFKENQYPQRAVKESLAAELALSVRQVSNWFNNRRWSFRHSSRIGSDVAKFDSNDTPRQKSIDMSGPSLKSVLDSATYSEIEKKEQDTASLGLTEGCDRYMTLNMVADEGNVHTPCIAETREEKTEVGIKPQQNPL

SEQ ID NO: 205 - DNA, 2160 bp, Zea mays
atggaaaaaaatatagctcactgtcctgttgagggcaatggtgagattgaaaatggtgcgagctctagtcagaatcctgagtctcttgagcattcagttttgctgtctacatctcaaacgatgccaaataacttggggataaggaaaaactataaaagggcagcaaacagaggtaaaaaaggttcccaaggactaacaggccaagcatatactttgatgtcatctaatagtgatgtcagggtgcttcgctccacatcaagttcaaagacaacatctactgagcatgttcaggctccagtacaaccggctgccaagagaagaaaaatgagcagagcctcaaacaaaagttcgactgatgagttttcacaaattcgtaaacgagttagatatattttgaaccgaatgaattatgagcaaagcctaattgaagcttatgctagcgaaggctggaaaaatcaaagtttggataagataagacctgagaaggagcttgaacgagccaaatcagaaatcttacgatgcaaattgagaatacgagaagtcttccggaatattgattctcttctctccaaggggaaaattgacgaaactttatttgattctgaaggagaaatatcttgcgaagatatcttttgttccacttgtggttcgaatgacgctacattgggtaatgatatcattctctgcgatggagcttgtgacagagggttccaccagaactgtttaaatcctcccctgcgtactgaagatatccccatgggagatgaaggatggctctgcccagcatgtgattgcaagatagattgtatagatctaataaatgaactccatgggagtaacatctccattgaggactcttgggagaaagtttttccagatgcagctgctatggcaaatgactctaaacaagatgacgcatttgatcttccatcagatgactcagacgacaatgactttgaccccaatatgcctgaagagcatgtggttggtaaggatgaagaatcgtctgaagaggatgaggatggaggatcagactctgatgactcagactttttgacatgttctgatgattcggaacctttgatagacaagaaggttgatgacctcagattaccttctgaagattcagaggatgatgactatgatccagcaggtcctgattcagataaagatgtcgaaaagaagtcaagttctgatgaatctgacttcacatctgactcagatgatttttgtaaggagatttcaaaatctggacatgatgaagtttcatcacctctattacccgatgccaaggtgggtgatatggaaaagattactgctcaagctaaaacaacaagttctgctgacgaccctatggagactgaaatagaccagggtgtggttttaccagattcaaggagacggcaagctgaacggttggactacaaaaagttgtatgatgaggcatatggtgaagcatcatctgattctagtgatgatgaagaatggtctgggaagaacacgccaataataaaaagcaatgaagagggtgaagccaattctcctgcgggaaaaggctccagagttgtgcaccataatgatgaactgactacacaaagcactaaaaaaagcttgcattctattcatggttcagtagatgagaaacctggagaccttacttctaatggcagcaacagcacagccaggaaaggacattttggcccagtaattaatcagaagctacatgaacattttaagacacaaccataccctagtcgttctgttaaagaaagtctggcagaagaactagggttaacatttcgtcaggttaacaaatggtttgaaactaggcgtcattccgcaagggtagcttcttccaggaaaggcatcagtctagataagcatagcccccaaaatactaatagtcaagtgacagctagtatggaacctaaagaacctgaggggactgtggtggaagaatctaatgtatgcctaaatgggggtactaccatctctaaagaagcagtgtcttcaaaagttggatcaagaacccctggaagtgatgtgggagggtcaaaagttgattctgctgaggatcagaatccggggcctgatcttgcagagaaggcaaggcaaaaggcaatacagcaggagttgaggaagaaaaaaatgggacgatga

SEQ ID NO: 206 - protein, 719 aa, Zea mays
MEKNIAHCPVEGNGEIENGASSSQNPESLEHSVLLSTSQTMPNNLGIRKNYKRAANRGKKGSQGLTGQAYTLMSSNSDVRVLRSTSSSKTTSTEHVQAPVQPAAKRRKMSRASNKSSTDEFSQIRKRVRYILNRMNYEQSLIEAYASEGWKNQSLDKIRPEKELERAKSEILRCKLRIREVFRNIDSLLSKGKIDETLFDSEGEISCEDIFCSTCGSNDATLGNDIILCDGACDRGFHQNCLNPPLRTEDIPMGDEGWLCPACDCKIDCIDLINELHGSNISIEDSWEKVFPDAAAMANDSKQDDAFDLPSDDSDDNDFDPNMPEEHVVGKDEESSEEDEDGGSDSDDSDFLTCSDDSEPLIDKKVDDLRLPSEDSEDDDYDPAGPDSDKDVEKKSSSDESDFTSDSDDFCKEISKSGHDEVSSPLLPDAKVGDMEKITAQAKTTSSADDPMETEIDQGVVLPDSRRRQAERLDYKKLYDEAYGEASSDSSDDEEWSGKNTPIIKSNEEGEANSPAGKGSRVVHHNDELTTQSTKKSLHSIHGSVDEKPGDLTSNGSNSTARKGHFGPVINQKLHEHFKTQPYPSRSVKESLAEELGLTFRQVNKWFETRRHSARVASSRKGISLDKHSPQNTNSQVTASMEPKEPEGTVVEESNVCLNGGTTISKEAVSSKVGSRTPGSDVGGSKVDSAEDQNPGPDLAEKARQKAIQQELRKKKMGR

SEQ ID NO: 207 - DNA, 2079 bp, Zea mays
atggaaaaaaagacagttcacgttctggctgagggtaatggtgagattgaaaatggtacgagctctagtcagaatcctgagacccttgagcatccagttttgctgtctgcatctcaaactgtgccaaataacttggggataaggaaaaactataaaagggcagcaaacagaggtaaaaagggttcccaaggactaacaggtcaggcatatacattgaggtcatctgatattgatgtcagggtgcttcgctctacatcaggttcaaagacaacatctactgagcatgtgcagcctccaggacaaccagctgccaagagaagaaaaaggagcagagcctcaaacaaaaattcgacagatgagttctcacaaattcgtaaacgggttagatacattttgaaccgaatgaattatgagcaaagcctaattgaagcttatgctagtgaaggctggaaaaatcaaagtttggataagataagacctgagaaggagcttgaacgagccaaatcagaaatcttacgatgcaaattgagaatacgggaagtcttccaaaatattgattctcttctgtccaaagggaaaattgacgaatctttatttgattctgaaggagaaatatcttgtgaagatatcttttgtgctacttgtggttcgaaaaatgctacattgggtaatgatatcattctctgtgatggagcttgtgacagagggttccaccagaactgtctaaatcctcctctgcgtactgaagatattcccatgggagatgaaggatggctctgcccagcatgtgattgcaagttagactgtatagatctaataaatgaactccagggcagtgacatctccattgaggacccttgggagaaagtttttccagaggcagctgctatgaccaatggctctaagcaagatgaacgatttgatcttccatctgatgattcggatgacaatgattttgaccccaatatgcctgaagagcatgtggctagtaaggaagaaggatcttctgaagaggaagaggatgatgacggaggatcagactctgacgactctgacttcttaacctgttctgatgatttggaacctttgatagataaaaagaaggttgatgacctgggattatcttctgaagattcagaggatgatgactatgatccagcaggtcctgattcggataaagatgtcgaaaagaagtcaaattctgatgagtctgatttcacgtctgactcggatgatttttgtaaggagattaaaaaatctggtggacatgatgaagtttcatcgcctccattacccgatgtcaaggtgggtgatatggaaaagaacactgctcagtctaacacaacaagttctgctgacgaccctatggagactgaaatagaccagagtgtggttttaccagtatcaaggagacgtcaagctgaacggttggactacaaaaggctgtatgatgaggcatatggtgaagcatcatctgattctagtgatgaagaagaatggtctgggaagaacacaccaataaaaagcaatgaagagggtgaagttggttctcctgcaggaaaaggctctagagttgcgcaccataatgaactgactacacaaaacactaaagaaagcttgcattctcttcatggttcagtagatgagaaacatggagatcttacttctaatggcagcaatatcaaagataggaaaggacattttggtccagtgattagtcagaagctacatgaacattttaagacacaaccataccctagtcgttctcttaaagaaagcttggcagaagaactagggctaacatttcatcaggtcaacagatggtttgaaaataggcgtcattttgcaaggttagcttcttccaggaaaggcatcagtccagataagcatagcccccaaaatactaatagcccagtgacacctagtatgcaacctaaagaaccagaggggactgtgatggaagaatctaatgtatgcataaacagggatgctaccatctctaaaaaagcggtttcttcaaaagtcggatcaagaaagaaccttagcaagagttcccctaaaagccgggtcaaaagttga

SEQ ID NO: 208 - protein, 692 aa, Zea mays
MEKKTVHVLAEGNGEIENGTSSSQNPETLEHPVLLSASQTVPNNLGIRKNYKRAANRGKKGSQGLTGQAYTLRSSDIDVRVLRSTSGSKTTSTEHVQPPGQPAAKRRKRSRASNKNSTDEFSQIRKRVRYILNRMNYEQSLIEAYASEGWKNQSLDKIRPEKELERAKSEILRCKLRIREVFQNIDSLLSKGKIDESLFDSEGEISCEDIFCATCGSKNATLGNDIILCDGACDRGFHQNCLNPPLRTEDIPMGDEGWLCPACDCKLDCIDLINELQGSDISIEDPWEKVFPEAAAMTNGSKQDERFDLPSDDSDDNDFDPNMPEEHVASKEEGSSEEEEDDDGGSDSDDSDFLTCSDDLEPLIDKKKVDDLGLSSEDSEDDDYDPAGPDSDKDVEKKSNSDESDFTSDSDDFCKEIKKSGGHDEVSSPPLPDVKVGDMEKNTAQSNTTSSADDPMETEIDQSVVLPVSRRRQAERLDYKRLYDEAYGEASSDSSDEEEWSGKNTPIKSNEEGEVGSPAGKGSRVAHHNELTTQNTKESLHSLHGSVDEKHGDLTSNGSNIKDRKGHFGPVISQKLHEHFKTQPYPSRSLKESLAEELGLTFHQVNRWFENRRHFARLASSRKGISPDKHSPQNTNSPVTPSMQPKEPEGTVMEESNVCINRDATISKKAVSSKVGSRKNLSKSSPKSRVKS

SEQ ID NO: 209 - DNA, 4731 bp, Zea mays
atgggaaggaaagggtcagaagtatcaccaagcaaaaggtatcccttgaggtctgcacacagtagtggtagagttcttcgctctgccttagccaataataataaggacagtgagcctctgaatgcggctgctgctacccaagcagctgtgaaaaaaagaagtggcaaccagctagatagtcctaatagcactgtcaggctacttcgttctacgtcaaaaaataaggacgaggcacatagcgggcctcttaatgacaggatcattgataagccagctgcaaataaaagaaaacatgccaatccctcacaggttggaagtcccagcagcagtgtcagggtgcttcgctctgcaataaaaaataaagatatggcgcgcagtgagcctcaaagtgacaggaccgctggtgaggcagctacaaataaaagaaaaaacgccaattcctcaaaggtggggagtctgagctctggtctcagtgtgcttcggtctgcttcaaaagctaaggatgagacatgtatcaaacctttaaatgatagtcctgctgttgaaccagcttcaagtaaaagaaaatgcaccagtccgtcaaaggtgggaagtcccagcaacagtgtcagggtgcttcgatctacttcaaaatataagaatgagacatgtaccgagcctttaaatgatagtggtgctgttgaaccagctgcaaatagaaggaaaggtgtcagtcgttcaaaggagggaagtcccaatagcagtgtcagggtgcttcgctctgcctcaaataataagattgatgtatctattgagccactgaataatagtactactggtcaaccggctgcgaaaagaagaaaaaatggcagttcctttaagagcagtgccagggtgctttgctctacctcagaaaggaaaaatgaggcatctagtgagcctttaaatgatagtactgctgctcagccagctgcgaggaaaaagaaaggtggtgcaatgccaaagactgataacccaaagattggtgtcagggttcttcgctctgcctcaggaaagaagaatgagacatgtactgagcctgtaaatcggagtacttctcgtgaaccaactgtgacaaaaaaaagaaattgcaagccttcaaaggatcgcggtcccaagaaggactacttaaaaatttgtcaaagaattaaatatattttgaatcgaatgaagtatgaacaagcctttattcaggcttatgcaagtgaaggttggaaaggccaaagtttggaaaaaataagacccgagaaggagcttgaacgagccaaggcagaaatccttcaatgcaagttaagaatccgggaagcttttcgaaatatggactctcttttatcgaaggggaagcttgaagaatctttgtttgattcagcaggacaaatttcaagcgaagatatattttgtgccatatgtggctcaaaggatgttacttcacaaaatgacatcattctttgtgatggagcctgtgacagaggattccaccagaattgtttgagccctcctttgctaactgaagaaattcctccgggggatgaaggatggctttgccctgcatgtgtgtgcaaagcagactatatagatgcgttaaatgaacttcaaggaagcaaactctccattcatgactcatgggtgaaagttttccctgaggcagcttcaactgccaatggttctaaacaagttgatgcttctgatctgctgccagatcatataaaggacagtgctaaccttgcattggttggaacacacatggtgaatgaaatcaggttttctgaagaggatgatagcaaagcggatgacctcggcttgccttcggaggactcaggggatggtgacttcgatccagcaggtccagattctagtgaagaccaaaatgatggattgaactcagaagagtcagatttcacatctgactctgattatttttgtgctgagattgctaaatcttgcggccaggatgaagtctcggcatctccattatcaaatgtgataaaccgtactgatagaatgaaactcagggcctacagtagacgctctaatgaagaaaaccacaatcatgcatttatggacatggagctagagcaagacatagtgctaccagttccaagcaggcggcaggttgaacggttggattacaaaaaactatacgatgaggcatatgaggaagaatcatctaattcaagtgatgaagaagagtggtctggaaaagaactcttagaaggcagtggaacagattcacttgatgagccttcgtcctgtaaaaggctctctagaagagcaccagcagggcagcagaataatgaacttacaccacagagccggcctcatggttctaacagtgagcagaaaactgaagttcttcgctccaatggcagtagtagcacaggacggaagtatgatcctgaagttacccagaaattgaaggtgcattttgagaaagatccatatcctagccgtgaaacaaaagaaaatctatcagaagaactaggcttgacatttaatcaggtctccaaatggttctctagtactcgtcactattcaagggttgcttctgccaaaaaagaaatgcatcctgacagccatacttgtgagaataatgatgagacaactgtagacagcatgcaagcaaaacaacccaatgctggggtgatggaaaagttgacgggggatagaaatggcattgttcctgagaaaccgatggtgcaggacaatcttaaccaaggagcgatggaaaagttaactagggataaaaatgacattgttcctgagaaaccggtgatgcagagcagtcttaaccaatgtaataatgaagatataccgctttctggaacagaaattgagatggagtcttacgaacaagaatcatctgactcaagtgatgaagagtggtccatacttagcacaccacgaaaaacaagattacaagaccatggaaaatcatcagttactgaatcacttcgttctgcaaaacggtgttccagaagagcaccagctagggagcagaataatgaacgtattcagagtgagcagcttcatggttctgcaagtgagcagcaaactgaatttcttcgctccaatgtcagcagtggcaaggtctcaaaatatcattttggccctatagttagtcagaagcttaaggaacattttgaaaaagatccatatccttgccgtgcaacaaaagagagtctggcacaagagctaggactgacatttaatcagatcagtaagtggttctctggcactcgtcattattcaagagatgctgttgccaagaatcagaaacgcccgggagaaaatactactgtgaataataatagcacaacctttgatgacatacaagtaatagaacccaatgttgggttgatagataaaccagctgcagatgtaaatgacatgatttctgaaaagttgatggtccaaataaatcttaacgaaggcattgaagaagatatcccaccgagccaatatgccaggtgtgaagagaaaataactatgactccagctgccatctcaagggaagctggtcttccaggatatggtcctggtcctggagaaaactttcttcaggtcagttcaaggaatactagctgtgagcagagtgtgatactggctcctaccgctatcgcaagagaagttggtccaccaggatatgcgactggagaaaaccagggcaatggggctccatggaatacaagttatgagcgaagactatttatgaatcctgtgaccagctcaagagcagtcagtcctccaggatatgggcctgaagaaagccgaggcagtggcatttcctggaatacaagcagtgaacaaatattgtttatgagtcctacaaccatctcaagagaacttggtccaccaggatatgggcctagagaagaccagtgcagtggcacttcatggaatgcaagctgcgagttgggagtatttatgagtcctgtgaccacctcaagagaagacagtccgccaggatatgggcctcgagaaaaccaggagaatgacaatatgagatgcgagttgagaatgtttacaagtcctacaaccatctccagagaagttggcccaccaggatatgagcttactggaaaaaacaagggcaacggcgcttcatgtactacgaattaccagcagggagcgtttacgagtcctgaagccttcccaagagaagcctgtcctccaggatttgtgtctggagagaaccagggtaacgacactccatggtatatgagcagcaaacagatggcgtttacgagtcctacgaccaaccctagagtaggtccgccagggtatggacaggaaaaccagggcagtcgtgtttcttggaatacgagttatgagcagggagtgtttatgagttctacaaacatctcaagagaagccggtccgccaggttatgggcctggggaaagtcagggcaatatcacttcatggatttcgacaggcgggcagagaatgtttacaggtccttcaactatcccgaacgaagtcgggcagcaaggatatggcccttcaggaatcccgggaacggatggctcaaggagtatggacttgaaagcctttccaccaggatatggacctgctggagaaaaccagggcggtggtgcttcagggagcgtcataagcccccatgctcggtctgcagagaacgtagagttttcagacgacgctagaaaaaaggctatacagcgggagctgagacggcggcagaagttcaggtga

SEQ ID NO: 210 - protein, 1576 aa, Zea mays
MGRKGSEVSPSKRYPLRSAHSSGRVLRSALANNNKDSEPLNAAAATQAAVKKRSGNQLDSPNSTVRLLRSTSKNKDEAHSGPLNDRIIDKPAANKRKHANPSQVGSPSSSVRVLRSAIKNKDMARSEPQSDRTAGEAATNKRKNANSSKVGSLSSGLSVLRSASKAKDETCIKPLNDSPAVEPASSKRKCTSPSKVGSPSNSVRVLRSTSKYKNETCTEPLNDSGAVEPAANRRKGVSRSKEGSPNSSVRVLRSASNNKIDVSIEPLNNSTTGQPAAKRRKNGSSFKSSARVLCSTSERKNEASSEPLNDSTAAQPAARKKKGGAMPKTDNPKIGVRVLRSASGKKNETCTEPVNRSTSREPTVTKKRNCKPSKDRGPKKDYLKICQRIKYILNRMKYEQAFIQAYASEGWKGQSLEKIRPEKELERAKAEILQCKLRIREAFRNMDSLLSKGKLEESLFDSAGQISSEDIFCAICGSKDVTSQNDIILCDGACDRGFHQNCLSPPLLTEEIPPGDEGWLCPACVCKADYIDALNELQGSKLSIHDSWVKVFPEAASTANGSKQVDASDLLPDHIKDSANLALVGTHMVNEIRFSEEDDSKADDLGLPSEDSGDGDFDPAGPDSSEDQNDGLNSEESDFTSDSDYFCAEIAKSCGQDEVSASPLSNVINRTDRMKLRAYSRRSNEENHNHAFMDMELEQDIVLPVPSRRQVERLDYKKLYDEAYEEESSNSSDEEEWSGKELLEGSGTDSLDEPSSCKRLSRRAPAGQQNNELTPQSRPHGSNSEQKTEVLRSNGSSSTGRKYDPEVTQKLKVHFEKDPYPSRETKENLSEELGLTFNQVSKWFSSTRHYSRVASAKKEMHPDSHTCENNDETTVDSMQAKQPNAGVMEKLTGDRNGIVPEKPMVQDNLNQGAMEKLTRDKNDIVPEKPVMQSSLNQCNNEDIPLSGTEIEMESYEQESSDSSDEEWSILSTPRKTRLQDHGKSSVTESLRSAKRCSRRAPAREQNNERIQSEQLHGSASEQQTEFLRSNVSSGKVSKYHFGPIVSQKLKEHFEKDPYPCRATKESLAQELGLTFNQISKWFSGTRHYSRDAVAKNQKRPGENTTVNNNSTTFDDIQVIEPNVGLIDKPAADVNDMISEKLMVQINLNEGIEEDIPPSQYARCEEKITMTPAAISREAGLPGYGPGPGENFLQVSSRNTSCEQSVILAPTAIAREVGPPGYATGENQGNGAPWNTSYERRLFMNPVTSSRAVSPPGYGPEESRGSGISWNTSSEQILFMSPTTISRELGPPGYGPREDQCSGTSWNASCELGVFMSPVTTSREDSPPGYGPRENQENDNMRCELRMFTSPTTISREVGPPGYELTGKNKGNGASCTTNYQQGAFTSPEAFPREACPPGFVSGENQGNDTPWYMSSKQMAFTSPTTNPRVGPPGYGQENQGSRVSWNTSYEQGVFMSSTNISREAGPPGYGPGESQGNITSWISTGGQRMFTGPSTIPNEVGQQGYGPSGIPGTDGSRSMDLKAFPPGYGPAGENQGGGASGSVISPHARSAENVEFSDDARKKAIQRELRRRQKFR

SEQ ID NO: 211 - DNA, 4620 bp, Zea mays
atgggaaggaaaggctcagaaatgtcaccaagtaaaaggtatcccttgaggtctccacatagtagtggtagagttcttcgctctgccttagccaatgataataaggacagtgagcctctgaatgctgctgctgctacccaagccgctgtgaaaaaaagaagtggcagtcagttggatagtcctaatagcagtgtcaggttgcttcactctacatcaaaaaataagaacgaggtatgtagcgggcctctaaatgacaggatccctgataagccagctgcaaataaaagaaaacgtgccagtccttcacaggtgggaagttccagcaacagtgtcagggtcgttcgctctgcaataaaaaataaagatgaggcatgcagtaaatctctaagtgacaggaccgctggtgagccagctgcaaataaaagaaaaaacgtcaatcgctcaaagacggggagtctgagctgtggtgtcagggtgcttctatctgcttcaaaagctaaggatgagacatctaccaagcctttaaatgatagtgctactgttgaaccagcttcaggtaaaaggaaaggcaccagtccgtcaaaggtgggaagtgccagcaatagtgtcagggtgcttcgatctacttcaaaatataagaatgagacatgtactgagcctttaaatgatagtggtgctgttgaaccagctgcaaataaaaggaaaggtgtcagtcgttcaaaggagagaagtctcaatagcagtgtcagggtcgttgctctggcctcaaataataagattgaggtatctattaagcctctaggtaatagtactgctggggaaccagctgcgaaaagaagaaaaagcggcagttccttcgaggcaggaagccctgtgagcagtgccagggtgcttcgccctacctcagaaaggaagaatgaggcatctaagcctttaaatgaaagtactgctgctcaaccagctgcgaggaaaaaaaaagctggggtaatttcaaagaccgacaatccaaagattggtctcagggttcttcgctctgcctcaggaaagaagaatgaagcatgtattgggcatgtaaatgatagtacttctgctgaaccaactgtgacaaaaagaaaccgcaagccttcaatggatcgcagtcccaagaaggactacttaaaaatttgtcaaagagttagatatattttgaatcgaatgaactatcaacaaacctttattcaagcttatgcaagtgaaggttggaaaggccaaagtttggaaaaaataagacctgaaaaggagcttgaacgagccaaggcagaaatcctccaatgcaagttaagaatccgtgaagcttttcgaaatatggactctcttttatccaaggggaagcttgaagaatctttgtttgattccgcaggagaaatttcaagcgaagatatattttgtgctgtatgtggctcaaaggatgttactttacaaaatgacatcattctttgtgatggagcctgtgacagaggattccaccagaactgtttgaaccctcctttgctaactgaagatatacctccgggggatcaaagatggctttgccctgcatgtgtctgcaaagcagactctatagatgcactaaatgaacttcaagggagcaagctctccattcatgactcatgggagaaagttttccctgaggcagcttcaattgccaacggttctaaacaagttgatacttctgatctgctgccagatcatataaagcacagtgacaaccctgcattggttgaagggctgatggtggatgaagtcaggctttctgcagaggatgacagcaaagcggatgaccttcgcttgtcttcggaggactcaggggatggtgacttcgatccgtcaggtccagattctagtgaagaccaaaaagatggattgaactcagaagagtcagatttcacatcagactctgatgatttttgtgctgagattgccaaatcttgtggccaggatgaagtctcggcatctccattatcaaatgtgataaaccatacttatagaatgaaactcagggccagcaacaaccgctctaatgaagaaaaccatgatcatgtatttatggacatggagctagggcaagacatggtgctaccagtttcaagcaggcggcaggtggaacggttggattacaaaaaactatatgatgaggcatatgggaaagaatcatctaattcaagtgatgacaaagagtggtctggaaaagaactattagaaggcagtgaaacagattcacttagtgagcgacctcatcctgtaaaacggtgctctagaagagcacaagcagagcagcagaataatgaacatacaccacagagggagcgccttcatggttctgaaagtgagcagaaaactggaattcttcgatccaatggcagcagtagcacaggacggaagtttggtcctgtagctacccagaaattgaaggtacattttgagaaagatccatatcctagccgtgaaacgaaagagaatatatcagaagaactaggcttgacatttaatcaggtctccagatggttctctagcactcgtcactattcaagggttgcttctgccagaaaagaaatgcatcctgacggccatactagcgagaataatgataccacgactgtagatagcatgcaagcaaggcaacccaacactgtggtgatggaaaagttgactgggaatagaaatgacattgtttctgagaaaccgatggtgcagaacaatcttaaccaaggggtggcagaaaagttgactagggatagaaatgacattgttcctgagaaacaggtggtgcagagcaatcttaaccaatgtaataatgaagatatcccgctttctggaacagaaattgagatggagtcttacgaacaagaatcatctgaaagcagtgatgaagagtggtccacacttagcacaccacgaaaaacaaaattacaaggcaacgaaaaagtatcacttactgaatcactacgttctgcaaaacggtgttctagaagagcaccagctagggagcagaataatgaacatactcagagtgagcaacttcatggttctgtaagtaaacagcaaactgaagttcttcgctccaatgtcagcagtggcgatgcctcaaaatgtcattttggccctatagttactcagaagctgaaggaacattttgaaaaagatccatatccttgccgtgcaacaaaagagggtctggcacaagagctaggactgacatttaatcagatcagtaagtggttctctgccacccatcattattcaagagatgctgttgccaagaaccaaaaatacccaggagaaaatactactgagaataatagtagcacaatctttgatggtatacaagtaatagaacccaattttggtttgatagataaaccagatgcagatacaaatgacatgatttctgaaaagttgatggtacaaattaatcttaacgaaggcattgaagaggatatcccaccgagccaatatactaccaggtgtgaagagaaattaactatgactcaagctgccatctcaagggaagctggacctccaggttatggtcctggagaaaactttcttcaggtcagttcaaggattactagctgtgagcagagtgtgataatggctcctagcgctatcgcaagaggagttggtccaccaggatatacgcctggagaacaccagggcaatggggctccatggaatacaagctatgagcgaagaccgtttacgagtcctgcgactagctcaagagaagtcggacctccaggatatgggcctgaagaaaaccaaggcagtggcatttcctgtaatacaagcagagagcaaatattgtttatgagccctacaaccatctcgagagaacttggtccaccaggatatttgcccagagaaaaccagcgcagtgacacttcatggaatacaagctgcgagtcgggactatttatgagtcctgcgaccacctcaatagaacatggtccaccaggatatgggcctggagaaaaccaggagaatgacagtacaagctgcgagttgagaatgtttaccagtcctacaatcgtctccagagaagttggcccaccaggataccagcagggagtgtttatgagtcctaaaaccatctcaagagaagtctgtcctccaggatttgggtctggagagaaccagggcaacgacactacatggtacaaacagagcgcgtttacaagtcctacaaccatctcgagagaagtcggtccgccagggtatggacaggaagatcagggcaatggtggttcttggaacacgagttgtgagcagggagtgtttacgagtcctactagaggcatctcaagagaagtcggtccgccaggatacgggcccggggaaagtcagggcaataccacttcgtggatttcgacctgccagcagagaatgcttgcaggaatccagagaactggtggctcaaggagtatggacttggaagcctttccaccgggatacggacctggtggtgcttcagggagtgtcataagcccccaagctcggtctgcagagaatgtagaattttcggacgaggctagaaaaaaggctatacagcgggagctgagacggcggcagaagttcaggtga

SEQ ID NO: 212 - protein, 1539 aa, Zea mays
MGRKGSEMSPSKRYPLRSPHSSGRVLRSALANDNKDSEPLNAAAATQAAVKKRSGSQLDSPNSSVRLLHSTSKNKNEVCSGPLNDRIPDKPAANKRKRASPSQVGSSSNSVRVVRSAIKNKDEACSKSLSDRTAGEPAANKRKNVNRSKTGSLSCGVRVLLSASKAKDETSTKPLNDSATVEPASGKRKGTSPSKVGSASNSVRVLRSTSKYKNETCTEPLNDSGAVEPAANKRKGVSRSKERSLNSSVRVVALASNNKIEVSIKPLGNSTAGEPAAKRRKSGSSFEAGSPVSSARVLRPTSERKNEASKPLNESTAAQPAARKKKAGVISKTDNPKIGLRVLRSASGKKNEACIGHVNDSTSAEPTVTKRNRKPSMDRSPKKDYLKICQRVRYILNRMNYQQTFIQAYASEGWKGQSLEKIRPEKELERAKAEILQCKLRIREAFRNMDSLLSKGKLEESLFDSAGEISSEDIFCAVCGSKDVTLQNDIILCDGACDRGFHQNCLNPPLLTEDIPPGDQRWLCPACVCKADSIDALNELQGSKLSIHDSWEKVFPEAASIANGSKQVDTSDLLPDHIKHSDNPALVEGLMVDEVRLSAEDDSKADDLRLSSEDSGDGDFDPSGPDSSEDQKDGLNSEESDFTSDSDDFCAEIAKSCGQDEVSASPLSNVINHTYRMKLRASNNRSNEENHDHVFMDMELGQDMVLPVSSRRQVERLDYKKLYDEAYGKESSNSSDDKEWSGKELLEGSETDSLSERPHPVKRCSRRAQAEQQNNEHTPQRERLHGSESEQKTGILRSNGSSSTGRKFGPVATQKLKVHFEKDPYPSRETKENISEELGLTFNQVSRWFSSTRHYSRVASARKEMHPDGHTSENNDTTTVDSMQARQPNTVVMEKLTGNRNDIVSEKPMVQNNLNQGVAEKLTRDRNDIVPEKQVVQSNLNQCNNEDIPLSGTEIEMESYEQESSESSDEEWSTLSTPRKTKLQGNEKVSLTESLRSAKRCSRRAPAREQNNEHTQSEQLHGSVSKQQTEVLRSNVSSGDASKCHFGPIVTQKLKEHFEKDPYPCRATKEGLAQELGLTFNQISKWFSATHHYSRDAVAKNQKYPGENTTENNSSTIFDGIQVIEPNFGLIDKPDADTNDMISEKLMVQINLNEGIEEDIPPSQYTTRCEEKLTMTQAAISREAGPPGYGPGENFLQVSSRITSCEQSVIMAPSAIARGVGPPGYTPGEHQGNGAPWNTSYERRPFTSPATSSREVGPPGYGPEENQGSGISCNTSREQILFMSPTTISRELGPPGYLPRENQRSDTSWNTSCESGLFMSPATTSIEHGPPGYGPGENQENDSTSCELRMFTSPTIVSREVGPPGYQQGVFMSPKTISREVCPPGFGSGENQGNDTTWYKQSAFTSPTTISREVGPPGYGQEDQGNGGSWNTSCEQGVFTSPTRGISREVGPPGYGPGESQGNTTSWISTCQQRMLAGIQRTGGSRSMDLEAFPPGYGPGGASGSVISPQARSAENVEFSDEARKKAIQRELRRRQKFR

SEQ ID NO: 213 - DNA, 2907 bp, Vitis vinifera
atggatgcttcccctgcccaagagagtaatcggactaggaaaagttctagtcctaaacagaatattttagaagaggccagaaaactttctgaaagtgtgtgtagcgaatcgtcagagcagaaacgtccctctgaaaatggacagcatgagccagcagaaatcagccctgtgctatccaattgtattgttactgaacagtcagaactgcctccagaagatgtgggtgatacaatattaggattgcctccagcagatgtgaccaagaattctcttactgaacatttgggattgcctccagaagatgcaatcaagaatgatggaactgaacaattggggttttttcctgaagttgtgaccaagagttctattattgaaaaattaggacaatcagagccacctcctgaaaatgtggcccggtattctggtcttgaccagtcagggtcagcacccaaagatttggccaataaaagaactgcaaaactagttaaaagaaaatataaattgagatcttcagtaagcggttcccgggttttacgctcaaggtcacaagagaaacctaaagcttcacagccaagtgataattttgtaaatgccagtgctagcagagaaaggaaaggaagaaagaagaaaaggatgaataaaacaactgcagatgaatttgcgagaatcaggaaacatcttagatatttactgaacagaatgagctatgagcaaaatctgattgatgcttattctgccgaaggttggaaaggacaaagtgtggaaaaattaaagccagagaaggaacttcaacgtgcctcatctgaaatttctcgtcgcaaactgmaaatacgtgatctatttcaacatcttgattcattatgtgctgaaggaaggtttccagaatctttatttgattctgaagggcagattgacagtgaggatatattctgtgctaaatgtgagtccaaagacatgtctgctgataatgacataatactctgtgacggtgcttgtgatcgtggatttcaccagttttgtctggaaccgccattgttaaaagaagaaattcctcctgatgacgagggttggctgtgccctgcatgtgattgcaaagttgactgcatggacctgcttaatgactctcaaggaacaaaactttctgtaattgatagctgggagaaggtttttcctgaggcagctgcagctgggaataaccaggataacaactctggattttcatcagatgattctgaggataatgattatgaccccgattgtccagaggttgatgagaagggtcagggagataagtcaagttctgataaatttgatgaatctgatgaatttgacgaatctgatgaatctgatttcacttctgcatctgatgatatggtggtctcaccraataatgagcagtgtttggggcttccttctgatgattcagaggatgatgattttgatcctgatgctccagaaattgatgaacaggttaatcaggggagttcaagttctgattttacatctgactccgaggattttactgccactttagatcgcagaaacttctctgacaacgaggatggtcttgatgagcaaagaagatttggtaggaagaagaaagatactttaaaggatgagctcttatccgtgttagagtcaaattctggtcaagataatgcacctctgtctgcaaagagacatgtagaaaggctggattacaaaaagctgcatgatgaggcatatggaaatgtttcttctgattcaagtgatgatgaagactggacagagaatgttataccaagaaagaggaagaatcttagtggtaatgttgcctcagtgtcaccaaatggaaacacttcaatcactgagaatgggacaaataccaaggacataaagcacgacttggaagcagctggatgcactcccaagcgaagaactcgtcagaagctgaactttgaaagcacaaataattcacttgctgagtcacataaaggttctcgaagtcctggttctactggtgaaaaaagtgggcaatcatcatataaaaaacttggagaagctgtaactgagagactctacaaatccttccaggaaaatcagtaccctgatcgtgctatgaaagaaaaattggcagaagagctgggaataacgagccggcaggttagcaaatggtttgagaatgcccgttggagctttcgccatcgaccacccaaggaagccagtgcgggtaaaagtgctgtgaaaaaggatgcatccacgtctcaaacagatcaaaagcctgagcaagaagtggttcttagagaaagttctcacaatggagtgggaaaaaaggagtcgcccaaagcaggtgcttcgaaggtagaccgcagcaaggaagccaatgcaggtaaaagtgctgtgaaaaaggatgcatccacgtctcaaacagatcaaaagcctgagcaagaagtggttattaaagaaagttctcacaatggagtgggaaaaaaggagtcgaccaaagcaggtgcttcgaaggtagaccgctgcagtggagctaagaggagaaggaaattggcaactgatggaagccatagacagaaatcttcaactcccaactctacaagacaaaagacaaagtcaaatcatgaagcatctgaggcaaccaatggaagcagaaggcagaattcttctactcccaagtctagaaggcaaaagactaagttagctggtgaagcgtctgaagcaactggtggaagcagtagacagaattcgtcaaccccaaattctaaaaggcgaaaaaccaagtcagatcatgaagcatctaatcccgtccttagcggtaagaagatagcaaagacggcaaagagctcatctggcacaccaaaaacaaaggaaaagctaagtgacagaatccaaacaagaagtaggaaatctattgcttga

SEQ ID NO: 214 - protein, 968 aa, Vitis vinifera
  UNSURE (276)..(276): Xaa can be any naturally occurring amino acid
MDASPAQESNRTRKSSSPKQNILEEARKLSESVCSESSEQKRPSENGQHEPAEISPVLSNCIVTEQSELPPEDVGDTILGLPPADVTKNSLTEHLGLPPEDAIKNDGTEQLGFFPEVVTKSSIIEKLGQSEPPPENVARYSGLDQSGSAPKDLANKRTAKLVKRKYKLRSSVSGSRVLRSRSQEKPKASQPSDNFVNASASRERKGRKKKRMNKTTADEFARIRKHLRYLLNRMSYEQNLIDAYSAEGWKGQSVEKLKPEKELQRASSEISRRKLXIRDLFQHLDSLCAEGRFPESLFDSEGQIDSEDIFCAKCESKDMSADNDIILCDGACDRGFHQFCLEPPLLKEEIPPDDEGWLCPACDCKVDCMDLLNDSQGTKLSVIDSWEKVFPEAAAAGNNQDNNSGFSSDDSEDNDYDPDCPEVDEKGQGDKSSSDKFDESDEFDESDESDFTSASDDMVVSPNNEQCLGLPSDDSEDDDFDPDAPEIDEQVNQGSSSSDFTSDSEDFTATLDRRNFSDNEDGLDEQRRFGRKKKDTLKDELLSVLESNSGQDNAPLSAKRHVERLDYKKLHDEAYGNVSSDSSDDEDWTENVIPRKRKNLSGNVASVSPNGNTSITENGTNTKDIKHDLEAAGCTPKRRTRQKLNFESTNNSLAESHKGSRSPGSTGEKSGQSSYKKLGEAVTERLYKSFQENQYPDRAMKEKLAEELGITSRQVSKWFENARWSFRHRPPKEASAGKSAVKKDASTSQTDQKPEQEVVLRESSHNGVGKKESPKAGASKVDRSKEANAGKSAVKKDASTSQTDQKPEQEVVIKESSHNGVGKKESTKAGASKVDRCSGAKRRRKLATDGSHRQKSSTPNSTRQKTKSNHEASEATNGSRRQNSSTPKSRRQKTKLAGEASEATGGSSRQNSSTPNSKRRKTKSDHEASNPVLSGKKIAKTAKSSSGTPKTKEKLSDRIQTRSRKSIA

SEQ ID NO: 215 - DNA, 2805 bp, Populus tremuloides
atgtctgaggctgagaacatgggtgtttctccatcacaagttagttctcaaactaaaagttactcatgcccttcacaaactaaactggaaaatactcatggatttactgctgaatacaactgtggtggatattcggaagagaaacataagcttgagtctgaaatcatacaaactgaagccggagatagcggtactgcagttctccaatctggtgctggggaaactgtggaaccatctactgaagatgtaacaaacaattcttttactgatttggatccacctcccgaagatgccaggggtgctacttttgatgaaagttcaagacctatactaactgctatagatcagaaactcgagccaggtgctagaagtgtgaatactgcgtgtacgcatggtgaatcatcaaaagcaactgactctggtattctacaggatgaacctggaaataccaatgctgcatcatcaagctgcattgctaatgaaacctcacaagcatcacttgaaaatctagccaataattcttgtactgaagatgtgggtccgccgtatggagatgcaagcaagggtaaccagattgataaaagttcataccctcaacaaactatatctggacatacacttgagttactttctgacagagcttgttgtgaacgatcagaagaaagacagaagcctggatctgaactttcagaaaatgaatcaacgggaattgacactgaattatatagtggcattgctatcgagaattcagagccgcttactcaactagtgaccaagagttctcctatcaaacatgtaggcttgcttcctggtgacagcatcatcattcctgcaaatgaacaaacaagaccaactcatgatgatgaggacaaaggcccagatcatgaacatttggaaacaccatctagagttgcgattggtattactagacgcggtagacctagaggtaagagtgcttcaagattgtcaaggaagatatatatgttaagatctttgagaagtagtgatagagttctccggtcaagatcacaagagaaacctaaagctcctgaatcaagtaataattcaggtaatgttaattccactggtgataaaaaagggaaaagaaggaaaaagagaagaggaaagaatattgtggctgatgaatattccaaaatcagggcacatcttaggtacttattgaatcggatgagctatgagcaaagcttgatcactgcttattctggggaaggctggaaaggacttagcctagaaaagttaaagcccgagaaggagttgcagcgagccacatctgaaattaccagacgcaaagtgaaaataagggatttatttcaacatattgattctctgtgcagcgaaggaaggttcccatcatctttatttgattctgaaggacagattgacagtgaggatgtattctgtgcaaaatgtgggtccaaagatttgaatgctgataatgatattatactatgtgatggtgcttgtgacagaggatttcatcagttctgtttgataccaccattgttaagagaagacattcctcctgatgatgagggctggttatgccctggatgtgattgcaaagttgactgcattggtttgcttaacgattctcaaggaacaaatatatctatcagtgatagctgggagaaagttttccctgaggctgccgccacagcgtctggacaaaaactggatcacaactttggaccatcttctgatgattctgatgataatgattatgaacctgatggtccagatattgataagaagagtcaggaggaggaatcgagctctgacgaatctgacttcacttctgcatctgatgaattcaaggctcccccggatggcaaagagtacttggggctctcttctgatgattcagaggatgatgactatgatcctgatgctccagttcttgaggagaagctgaagcaggaaagttcaagttctgattttacatcagactctgaggatcttgctgcaactattaatggtgatgggttgtctttagaagatgaatgccacatgcctattgaacctcgtggagtttctaatgggaggaaatctaaatttgatggaaagaagatgcagtctttaaacagcgagcttttatccatgctagaaccagatctgtgccaagatgagtcagcaactgtttctggaaaaagaaatgttgacagattggactacaagaagctctatgatgaaacgtatggaaacatttctacttcaagtgatgatgattacactgatactgttgggccaaggaagaggaggaaaaatactggagatgttgctacagtgacagcaaacggagatgcctctgttaccgagaatggaatgaatagcaagaatatgaaccaggaattaaaggagaacaaacgtaatcctgagagaggaacttgccaaaactcgagctttcaagaaacaaatgtttccccggctaaatcatatgttggtgcatctctatctggttctagtggtaaaagcgttaggccctctgcttataaaaaacttggagaagctgtaactcagagactgtacagttacttcagggaaaatcagtatccagaccgagctgcaaaagcaagcttggcagaagagctaggaattacttttgagcaggttaacaagtggtttgtgaatgcccgttggagcttcaaccattcatcatctacaggtacaagtaaagctgaaagtgcttctggaaaaggtagctgtgatggccaagtgagggatagtgaatcgaagaaccgaaagagcaataaacaaaaaactaacaccccgaaatctaggagataa

SEQ ID NO: 216 - protein, 934 aa, Populus tremuloides
MSEAENMGVSPSQVSSQTKSYSCPSQTKLENTHGFTAEYNCGGYSEEKHKLESEIIQTEAGDSGTAVLQSGAGETVEPSTEDVTNNSFTDLDPPPEDARGATFDESSRPILTAIDQKLEPGARSVNTACTHGESSKATDSGILQDEPGNTNAASSSCIANETSQASLENLANNSCTEDVGPPYGDASKGNQIDKSSYPQQTISGHTLELLSDRACCERSEERQKPGSELSENESTGIDTELYSGIAIENSEPLTQLVTKSSPIKHVGLLPGDSIIIPANEQTRPTHDDEDKGPDHEHLETPSRVAIGITRRGRPRGKSASRLSRKIYMLRSLRSSDRVLRSRSQEKPKAPESSNNSGNVNSTGDKKGKRRKKRRGKNIVADEYSKIRAHLRYLLNRMSYEQSLITAYSGEGWKGLSLEKLKPEKELQRATSEITRRKVKIRDLFQHIDSLCSEGRFPSSLFDSEGQIDSEDVFCAKCGSKDLNADNDIILCDGACDRGFHQFCLIPPLLREDIPPDDEGWLCPGCDCKVDCIGLLNDSQGTNISISDSWEKVFPEAAATASGQKLDHNFGPSSDDSDDNDYEPDGPDIDKKSQEEESSSDESDFTSASDEFKAPPDGKEYLGLSSDDSEDDDYDPDAPVLEEKLKQESSSSDFTSDSEDLAATINGDGLSLEDECHMPIEPRGVSNGRKSKFDGKKMQSLNSELLSMLEPDLCQDESATVSGKRNVDRLDYKKLYDETYGNISTSSDDDYTDTVGPRKRRKNTGDVATVTANGDASVTENGMNSKNMNQELKENKRNPERGTCQNSSFQETNVSPAKSYVGASLSGSSGKSVRPSAYKKLGEAVTQRLYSYFRENQYPDRAAKASLAEELGITFEQVNKWFVNARWSFNHSSSTGTSKAESASGKGSCDGQVRDSESKNRKSNKQKTNTPKSRR

SEQ ID NO: 217 - DNA, 2793 bp, Populus tremuloides
atgtccgaggctgagcacatgggtgtttctccatcaaaagtttctcatactaaaagttattcatgccctgcacaaactacactggaaaatacgcatgaacccagtgctgaatacaagtttggtggatatccggaagagagacataagcttgagtgtgaaatcatacaaactgaagctggagataacagggctgcagttctccaatcttgttctggtgaagttgtgcaaccatctactgacgatttaacaaaaagtcctcttattgatttggacccacctcctgacgatgcaaggagtgctctgtttgataatagtccaagacctatatcaaccgctatggatcagaaacttgagccaggtgctacaagtgtgaatactgcttgtgtgcatagtgaatcatcaaaagcaattgactctagtattctactggatgaacctaggaatagcaacacagaattgtcaagctgcattgcaaatgaaacctcacaagcatcacttgaaggtctagccaatgattctcgtgctgaagatgcaggactgtcacttgtagaggcaagcaatagtgacctgattgatgaaagttcatactctcaacaaactacatctggacagacacgtgagtttcattctgacagagcttgttgtaaaccattggaagaaagacagaagcccggctctgaacttgcagaaaatgaatcaatggaaattggcattggattacccagtggtattgctattgagaatttggagccgcttactgaacttgtgaccaagagttgtcctatcaaacatataggcttgcctcctggtgatgacatcagcattcctgcaaatgaacaaataagacctactcatgataaggagtccaaataccctgattgtgaacatttggaaaaactatctggaattgtgattggtattactagtcaaggtgtacccagtgttaagagaacttcaaaattgtcagggaagaaatatacaagttcttcgagaaaaagtgatagagttctccggtcaaattcacaagagaaacctaaagctcccgagccgagtaataattctactaatgttaattccactggtgaggaaaaagggaaaaggaggaaaaagagaagagggaaaagtatagtggctgatgaatattccagaatcagggcacgtcttaggtacttgttgaatcggatgagctatgagcaaagcttgatcactgcttattccggggaaggctggaaaggacttagtctagaaaagttaaaacctgagaaggagttgcaacgggccacatctgaaatcatcagacgcaaagtgaaaataagggatttatttcaacatattgattcactatgcggtgaaggaaggttcccagcatctttgtttgattctgaaggacaaattgacagtgaggatatattctgtgcaaaatgtggatccaaagatttgactgctgataatgatattatactatgtgatggtgcttgcgaccgagggtttcatcaattctgtttggtaccaccattgttaagagaagacattcctcctggtgatgagggctggttatgccctggatgtgattgcaaagttgactgcattgacttgcttaatgactctcaaggaacaaatatatctatcagtgacagatgggataatgttttccccgaggcagctgcagtagcatctggacaaaaactcgactacaactttggattgtcttctgatgattctgatgataatgattatgatcctgatggtccagatattgacgagaagagtcaggaggaatcaagctctgacgaatctgacttcagttctgcgtctgatgaatttgaggctccacctgatgataaacagtacttggggctcccttctgatgattcagaggatgatgactatgatcctgatgctccagttctcgaggagaagctgaagcaggaaagttccagttctgattttacttcggactctgaggatcttgatgccactcttaatggtgatgggttgtctttaggagatgaataccacatgcctattgaacctcatgaagattctaatgggcgaagatcgagatttggtggaaagaagaatcattctttaaacagcaagcttttatccatgctagaaccagattctcaccaagaaaagtctgcacctgtttctggaaaaagaaatattgaaagattggactacaagaagctctatgatgaaacatatggaaacatttgtacttcaagtgatgatgatttcactgatactgttgcaccaaggaagaggaggaaaaacactggagatgttgctatggggatagcaaatggagatgcttctgttactgagaatggattgaatagcaagaatatgaatcaggaattaaagaagaatgaacatacttctgggagaactcaccaaaactcgagctttcaagatacaaatgtttccccagcaaaaacacatgttggcgaatctctctctggttctagcagtaaaagagttaggccctctgcttataaaaaacttggagaagctgtaactcagaaactgtacagtttcttcaaggaaaatcggtatcctgaccaagctgcaaaggcaagtttggcagaagagctaggaattacttttgagcaggttaacaagtggttcatgaatgctcgttggagcttcaaccattcatcacctgaaggtacaagtaaagctgaaagtgcttcaggaaagggtagctgtgatgggcatgtgagggatagtgaatcgaagaaccaaaagagcaataaacaaaaaactagtaccccaaaatctaggagatag

SEQ ID NO: 218 - protein, 930 aa, Populus tremuloides
MSEAEHMGVSPSKVSHTKSYSCPAQTTLENTHEPSAEYKFGGYPEERHKLECEIIQTEAGDNRAAVLQSCSGEVVQPSTDDLTKSPLIDLDPPPDDARSALFDNSPRPISTAMDQKLEPGATSVNTACVHSESSKAIDSSILLDEPRNSNTELSSCIANETSQASLEGLANDSRAEDAGLSLVEASNSDLIDESSYSQQTTSGQTREFHSDRACCKPLEERQKPGSELAENESMEIGIGLPSGIAIENLEPLTELVTKSCPIKHIGLPPGDDISIPANEQIRPTHDKESKYPDCEHLEKLSGIVIGITSQGVPSVKRTSKLSGKKYTSSSRKSDRVLRSNSQEKPKAPEPSNNSTNVNSTGEEKGKRRKKRRGKSIVADEYSRIRARLRYLLNRMSYEQSLITAYSGEGWKGLSLEKLKPEKELQRATSEIIRRKVKIRDLFQHIDSLCGEGRFPASLFDSEGQIDSEDIFCAKCGSKDLTADNDIILCDGACDRGFHQFCLVPPLLREDIPPGDEGWLCPGCDCKVDCIDLLNDSQGTNISISDRWDNVFPEAAAVASGQKLDYNFGLSSDDSDDNDYDPDGPDIDEKSQEESSSDESDFSSASDEFEAPPDDKQYLGLPSDDSEDDDYDPDAPVLEEKLKQESSSSDFTSDSEDLDATLNGDGLSLGDEYHMPIEPHEDSNGRRSRFGGKKNHSLNSKLLSMLEPDSHQEKSAPVSGKRNIERLDYKKLYDETYGNICTSSDDDFTDTVAPRKRRKNTGDVAMGIANGDASVTENGLNSKNMNQELKKNEHTSGRTHQNSSFQDTNVSPAKTHVGESLSGSSSKRVRPSAYKKLGEAVTQKLYSFFKENRYPDQAAKASLAEELGITFEQVNKWFMNARWSFNHSSPEGTSKAESASGKGSCDGHVRDSESKNQKSNKQKTSTPKSRR

SEQ ID NO: 219 - DNA, 2184 bp, Populus tremuloides
atgggtgattctggaaagaaatcaaagcagcaagacttgcacgaatcttcaccatctgacacagtgaatgggtcgttgctgattaaatcattgaagataaagaagggtggcaaattatctcatagaaaaagcgaaaaacctaaaactaaacctcatctgaaaactatcattaattcatctgtatcaaagaaaaaggttactcctaagaagggcatcaggaatggctctaccagtagaagattgattcacaggaaaattctgcataaagcacttgataagaaggcctcaagaaatggggcttcctcagagctccaaggcaaacagttgtcaactattgattctgaggggaatggaaaaaatgccgatgaaggtgcaattaaaaaagtcaagaagaggaagcctaagaaaaggcaaaaggacaaggtaaagctagatgaaccaccacgcttgcagaggagagcaaggtacttgatgattaaaatgaagctggagcagaatcttatagatgcttactctggagaaggttggaaaggtaaaagtcgagagaagattcggccagaaaaggaactactgagagccaggaaacagattttgaaatgtaaacttggattacgtgaaataattcggcaggtggattctctaagtacagtaggatgtattgaagatgctgttatggctccagatggatctgtttcccatgaacatatattctgtgcgaagtgcaaattgaatgaagtttcccaagataatgatattgtactctgtgatgggacatgcaactgtgccttccaccaaaaatgccttgatcctcctttggatactgaaaatatacctccaggagatcagggatggttttgcaagttctgtgactgtaggatggaaattatagaagccatgaatgctcatttggggacccacttctcagaggacagcggttggcaggatattttcaaagaagaagcagcagttccagatggtggaaatatgctattaaatccagaagaagaatggccttctgatgattctgaagatgatgattatgatccagagaggagagagaacgtcatgagtggagcaggtactgatgatgatgcatctgatgacaccagcaattcaacccgcttgagttggtcttcagatggtgaggttttttcaggatccaggaggtgggaggtggacggcttggacttcagaaacaattctatttatagcagtttagattctgatgaaaccagtgatggggaaattatttgtggccgtaggcagagaagagcggttgattataagaagttatacaatgagatgtttggaaaggacgctcctgcacatgagcaacccagcgaagatgaagattggggtcctagcaaaagaaagcgacgagagaaggagtcagatgcagccagcaccctaatgactctatatgaaagtaaaagaagatgtaaaaatgatgcaaccattgaaggcatgatgaagcttccacgagatcctcaaattcgaaggccaattttcaggctcccccctgatgctgttgagaaacttcgccaagtatttgcagagaatgaacttccatctagaactgtcaaggagaatctatcaaaagaattgggccttgaacctgggaaggttagcaaatggttcaagaattcccgttatttagctctgaagtctagaaaggtagagaagggagaacaagttcattattctagttccaaagtctctgctgaacccactttaaatgtcatgaaggacaaaactgctgatctttcactgttaaaggatagccaggcagaaactggggtgtgtaccccagagaatttgaaaaggatcttgcagaggaagaagccgaggtcaataagtaaaagtttaaagaaaaatgaacagaaaagaggttccttcgaatcacctactaaaagcaatgagatgaatgttgagcacaatgatgatctgagcttgaagaagctgttaaaagcaaaaacaaagggagtaaagaaaaagggtaatcgtatttcagcagctgctgaatctgatatggagaaactttgtagagcaaagacgagagtagagaatctgaagcagaaactggtgaaactacaaactggcaaagctaggaagtcttccaaaatccgtccgctagacgaatctgttgtctacgttcctattgctgagctaagagaaaagaaatga

SEQ ID NO: 220 - protein, 727 aa, Populus tremuloides
MGDSGKKSKQQDLHESSPSDTVNGSLLIKSLKIKKGGKLSHRKSEKPKTKPHLKTIINSSVSKKKVTPKKGIRNGSTSRRLIHRKILHKALDKKASRNGASSELQGKQLSTIDSEGNGKNADEGAIKKVKKRKPKKRQKDKVKLDEPPRLQRRARYLMIKMKLEQNLIDAYSGEGWKGKSREKIRPEKELLRARKQILKCKLGLREIIRQVDSLSTVGCIEDAVMAPDGSVSHEHIFCAKCKLNEVSQDNDIVLCDGTCNCAFHQKCLDPPLDTENIPPGDQGWFCKFCDCRMEIIEAMNAHLGTHFSEDSGWQDIFKEEAAVPDGGNMLLNPEEEWPSDDSEDDDYDPERRENVMSGAGTDDDASDDTSNSTRLSWSSDGEVFSGSRRWEVDGLDFRNNSIYSSLDSDETSDGEIICGRRQRRAVDYKKLYNEMFGKDAPAHEQPSEDEDWGPSKRKRREKESDAASTLMTLYESKRRCKNDATIEGMMKLPRDPQIRRPIFRLPPDAVEKLRQVFAENELPSRTVKENLSKELGLEPGKVSKWFKNSRYLALKSRKVEKGEQVHYSSSKVSAEPTLNVMKDKTADLSLLKDSQAETGVCTPENLKRILQRKKPRSISKSLKKNEQKRGSFESPTKSNEMNVEHNDDLSLKKLLKAKTKGVKKKGNRISAAAESDMEKLCRAKTRVENLKQKLVKLQTGKARKSSKIRPLDESVVYVPIAELREKK

SEQ ID NO: 221 - DNA, 2460 bp, Ostreococcus tauri
  misc_feature (178)..(178): n is a, c, g, or t
  misc_feature (214)..(214): n is a, c, g, or t
  misc_feature (1375)..(1375): n is a, c, g, or t
  misc_feature (1381)..(1381): n is a, c, g, or t
  misc_feature (1648)..(1648): n is a, c, g, or t
  misc_feature (1684)..(1684): n is a, c, g, or t
atgaatgaggtgcgcgacgcggaggaacgatgtaaacgtcgtgtgcgagcggtcgcggacgcggtgcggaagggaggcgtggtgtgggcgatcgtggggtggaaagatagtcaatgcgcgcgcgcggcgtccgacgcgcgcgttgttggagattgggcgcgcgcgatgtgtgtgagangactgacgatgcatcgatcggtggttgatgatacgnagtttgcgctcgcgcgatcgcggatacagtcgcagttcgcgacgattcgaagacatcaggcgttggtggaagcgtacgcgagcgacggctggcgcggacaggcggctcaaaagccgaaaccagtcagggagattgaaaaggcgcgcgagaagatattcgagggtaaattgaagatacgggagtattttaaggttttggagttcgatgagcgcgagcgcgagatcacgacggtggcggacgagtttggggagtgcgacgccgcggatattttttgtagcaagtgcaccctcgcagacgacaggcatgacgacgatattttgctctgcgatggcttctgcgatcgtgcgtatcatcaatcatgcgtggctccaccggttttggcggaagacattccgcccgaggacgaaggttggctctgtccgagatgcgacgcgcgagtggacgtcatttacgtcttgaacgacgagtacgatcaaaatttgggccagaggtgtgtttcagcggatattttcgttgcagaggcggacatgcgagataaagggatcgttccaggaacggcgcagttcaaacacgcgcacgaagaggattggccgagcgatgagagcgatgacgaggacttcgatcagggcggacacagcgacgatgggcgagacgacgagcacgaggcgctgagcggaagcgcacagtcatcgagcgatgaatcgagcagcgaatcagagtctgatctcatcatcgagggcccacgaaggcgcacgaaggttgattacgtcgccctgaacaacgccatgttcggcgacagcgaggcgtacgagggcgaagctgaggagctcggttggaaacgcagcaacaaaaccaaggcggagatgctcgcggcgctcaagggtgagagcgcgaacgggataacgaacggtgccacgaagaaggatccaaaatcaaaacgctcgaagcgagagcgcgtggatgagaaatctcccgcaccgcgcgtcaggttcactcccgatcaaaaacttgagctcgagcgtgtcttctccgagtgcgcgtcgctcgacattgacgcgcgcgacgccctcgcgaagcgactcgggatacccggcggcgcaaattcgattaaaatatggttcatgaatcgccgtcgtagggctaagattttgggtgagaggnaatacngacagcacgataatccacgtcccgctcgctcgttcgacgcctcgtcacaaacaacctctgaaaaaccttcaagtcacctcagaagctcacgcgcgtctcaaacatgtcgatcgcccctaaacgcgcccccaaactcatatacttctccgcgtggttctgcccgttcgcccatcgagcgacgctcgcgttggagcattacgcgcacggcggagagatttcctacgagtggaaggaatcgctcggtgaggtcacgcttcgttgacattngacgctcgaatgcgacgaaacttgagcgcctcgacngaccggagacgaatcgccgcgtaggatgggaaaaacgcaagtcaacctcgagtgaggtgaagacgaaacacgagaattggtaccattacaagtccccagagctactgagacacaacccgctgggcatggtgccgacactcgtgacgccggcgacgtatgaggataaagatggagatccatcgcggaacgtggtgacggagagcttggtgtgcgtacagtttatcgatgaactcgttcggggaaacgcgtacgccggggagacggcggcgatcatgccgagcgacccgtacgcgcgcgcgaaggcgagagtggacgccgactgggtgaacaaaaacgtatgctcgaggtattatcacgtcctggtgcgacaagaggcgagcgagcagagagaagcgtttgaaaagctcgtggaggggctggagacattcgcggcgtggtgcggcagcggagaagggaagttctatggtggacaaacgacgcccggattggtggactacgcgctctttccatgggcgtggcgcctcccggtgttcgagcactaccgcgggatggatttcaagattcctcgcaccgcggcactgaaatcgtatcacgattggatggaagccatgctcgcgcgagagcaagttcgcaagacgcttccaccgtgggacgattacttggaacacattggacgatacgccgacgggagcgcgcgatcgaaagtcgccaacgcagtccgcagcggccgtgcggcgcacgattacgacgacaaggaggacaacaccgatagttga

SEQ ID NO: 222 - protein, 819 aa, Ostreococcus tauri
  UNSURE (60)..(60): Xaa can be any naturally occurring amino acid
  UNSURE (72)..(72): Xaa can be any naturally occurring amino acid
  UNSURE (459)..(459): Xaa can be any naturally occurring amino acid
  UNSURE (461)..(461): Xaa can be any naturally occurring amino acid
  UNSURE (550)..(550): Xaa can be any naturally occurring amino acid
  UNSURE (562)..(562): Xaa can be any naturally occurring amino acid
MNEVRDAEERCKRRVRAVADAVRKGGVVWAIVGWKDSQCARAASDARVVGDWARAMCVRXLTMHRSVVDDTXFALARSRIQSQFATIRRHQALVEAYASDGWRGQAAQKPKPVREIEKAREKIFEGKLKIREYFKVLEFDEREREITTVADEFGECDAADIFCSKCTLADDRHDDDILLCDGFCDRAYHQSCVAPPVLAEDIPPEDEGWLCPRCDARVDVIYVLNDEYDQNLGQRCVSADIFVAEADMRDKGIVPGTAQFKHAHEEDWPSDESDDEDFDQGGHSDDGRDDEHEALSGSAQSSSDESSSESESDLIIEGPRRRTKVDYVALNNAMFGDSEAYEGEAEELGWKRSNKTKAEMLAALKGESANGITNGATKKDPKSKRSKRERVDEKSPAPRVRFTPDQKLELERVFSECASLDIDARDALAKRLGIPGGANSIKIWFMNRRRRAKILGERXYXQHDNPRPARSFDASSQTTSEKPSSHLRSSRASQTCRSPLNAPPNSYTSPRGSARSPIERRSRWSITRTAERFPTSGRNRSVRSRFVDIXRSNATKLERLDXPETNRRVGWEKRKSTSSEVKTKHENWYHYKSPELLRHNPLGMVPTLVTPATYEDKDGDPSRNVVTESLVCVQFIDELVRGNAYAGETAAIMPSDPYARAKARVDADWVNKNVCSRYYHVLVRQEASEQREAFEKLVEGLETFAAWCGSGEGKFYGGQTTPGLVDYALFPWAWRLPVFEHYRGMDFKIPRTAALKSYHDWMEAMLAREQVRKTLPPWDDYLEHIGRYADGSARSKVANAVRSGRAAHDYDDKEDNTDS

SEQ ID NO: 223 - DNA, 2076 bp, Aquilegia formosa x Aquilegia pubescens
  misc_feature (692)..(713): n is a, c, g, or t
  misc_feature (1459)..(1462): n is a, c, g, or t
atgcaagatggtgggaaccttggttttccaaagaaacgtgttggatcccaaataaatacctcatttcagaagaagaatagttgcaaaaatccgcatattaggagatggaaaccaaagccaagatctcatgtcaagacaattgcttcgttcttgtcgaagagaaagacatctgagctctcaagcaacagagccagaaataaatgttccaatggaaaaccttttagaagaagagcgtcacagaaacccaatgataccagtccttctgataggccactttcatcaatgcttaaagatttcaaatcgttaagcaataaatgtcagggacgtgaaaagacaactgacaaggatcttggaagtcaaaaggctcacagaaggagaaggagcaagaagaggaagaatgaggagttagatgaagccgctcgagtccaaagaagaacaaggtacctcctgattaaaatgaagctggagcagaaccttattgaggcttactctggggagggttggaaaggccagagtcgtgagaaaattaagccagaaaaggaactgcaaagagccaagaagcagatattgaagtgcaaacttggaattcgtgatgctattcgtcagctggaatctcttagttctgagggaagcattgaagattctgtgataggttcagatggatctgttttccatgaacatattttctgttnnnnnnnnnnnnnnnnnnnnnnagcatttccagataatgacattatactgtgtgatggagcatgcaattgtgctttccaccagaaatgcctggagcctccattagccactgaaaatattcctcctggtgatcaagggtggtattgcaaattttgtgagtgcaagatggcaatacttgatgcaatcaatgcacatcttgggactcagttttctctagacagtaaatggcaagatattttcatggaagcagctaatgcacgcgataatgaggatatctcaattcatcctgatggtgactggccatctgatgactctgaagatgttgattatgacccagaaaaatatgaaattgattgcagctatagcagaatgggctcggagcacaacgtgtctgacgatgcaagtagttccggcaccttgtattggacttccgaagaagatgatggtttgcattctgagcgattcagaactgatggtagtctggaggggggattttatggggataaaactaaaatccagagttctgatagcatagattccaatgacagtactgatggtatggcatttcatcgtaggcagcgaagagatgttgattataagaaactgcatgatgaaatgtttggtaaagatatgcctgaaagtgaagaaatcagtgaagatgaagattggggacctagaagaagaaagcgcagaagaaatgagtctaatgcagccactactttagtatcttcgtgtggtactgagaatgaattttcgaatgtggcacttnnnntaccatcaagagtggtcagggagagtctctcgaagcaattgggtattgcaattgagaagatcaacaagtggttcaagaatgctcggtatacagctttaaaaattagaaaggcagaaaagactgaacaatcccctggaggtggcaagatgcaaagtgctgacgtattaacatcaaaggaaaaccattatttggtctcaacaggaacagcagtccaaagatccaaagtttcgagtgtccatagaagtaaaaaccgtaaattgacaaccacaccctcaagggaagtacaagagaaagtgtctgctgttgcaccatccgctactgcaaatgaggtgagtgtacagttaagaaaagcagtgagcgtagagaaggaaatgggcagtgtaaaaagaaaatctgcacaagtaaagaggatcaagcgcacatgctccactaaggagcagcagctatacatgattgagttggagagaatttgccgtcttgaggagaagcttgaaaagatgaagaaggtattgcttagtatagatgacaatcatagtaatgtatcagatggaccccatatgaacgaacagtctgccgtatacattccagttgcagagctaagagaaaagatgtga

SEQ ID NO: 224 - protein, 691 aa, Aquilegia formosa x Aquilegia pubescens
  UNSURE (231)..(238): Xaa can be any naturally occurring amino acid
  UNSURE (487)..(488): Xaa can be any naturally occurring amino acid
MQDGGNLGFPKKRVGSQINTSFQKKNSCKNPHIRRWKPKPRSHVKTIASFLSKRKTSELSSNRARNKCSNGKPFRRRASQKPNDTSPSDRPLSSMLKDFKSLSNKCQGREKTTDKDLGSQKAHRRRRSKKRKNEELDEAARVQRRTRYLLIKMKLEQNLIEAYSGEGWKGQSREKIKPEKELQRAKKQILKCKLGIRDAIRQLESLSSEGSIEDSVIGSDGSVFHEHIFCXXXXXXXXAFPDNDIILCDGACNCAFHQKCLEPPLATENIPPGDQGWYCKFCECKMAILDAINAHLGTQFSLDSKWQDIFMEAANARDNEDISIHPDGDWPSDDSEDVDYDPEKYEIDCSYSRMGSEHNVSDDASSSGTLYWTSEEDDGLHSERFRTDGSLEGGFYGDKTKIQSSDSIDSNDSTDGMAFHRRQRRDVDYKKLHDEMFGKDMPESEEISEDEDWGPRRRKRRRNESNAATTLVSSCGTENEFSNVALXXPSRVVRESLSKQLGIAIEKINKWFKNARYTALKIRKAEKTEQSPGGGKMQSADVLTSKENHYLVSTGTAVQRSKVSSVHRSKNRKLTTTPSREVQEKVSAVAPSATANEVSVQLRKAVSVEKEMGSVKRKSAQVKRIKRTCSTKEQQLYMIELERICRLEEKLEKMKKVLLSIDDNHSNVSDGPHMNEQSAVYIPVAELREKM

SEQ ID NO: 225 - DNA, 1743 bp, Glycine max
  misc_feature (261)..(261): n is a, c, g, or t
aagaagaaaagacaaaggaataacatagatgttgatgatgcttcacgcttgcgaaggagaacaaggtacctcttaatcaaaatgaagctagagcagaaccttattgatgcttactctggagaaggttggaaaggtcaaagtcgggaaaagattaggccagaaaaggagctactacgagcaaaaaagcagattttaaaatgtaaacttagtattcgcgatgccatacaccagctggattctcttagttctgtgggtagcatngaagattctgccattgctccagatggatctgtttatcatgaaaatatattctgtgccaattgcaaactacatgaagctttcccagataatgatattatactctgtgatggcacttgcaatcgtgcttttcaccaaagatgtctcaatcctcctttggatactgaaaatattcctcctggagatcaaggctggttttgcaagttttgtgaatgtaagatagaaatactagaggcaacaaatgcccatcttgggactcaattctccctagacagtaattggcaggatgtattcaaggaagaggctgctatgcctgatggtgacattgcattactaaatcctgaagaagaatggccatcagacgatcctgaagatgatgattacaatccagagaggaaagaagacaaccacaactttgacacagaaggagctgatgaaaatgcatccaatgattcaaccagttgttccagtctgttgtctttgaatggcgaatgtcctccagtagatgaaggcatctgtcatgaatattattctgttaatagctgcttagattctgatgaatctggggaaatagcatgtggtcctaggcagcgtaaagctgttgactacaagaaactctatgatgaaatgtatgggaaggatgctccaccttgtgaacaaatgagtgaagatgaagactggggtcctggcaaaagaaagcgaagagaaaaggagtctgatgctgttgattctcttatgactttgcatgaaagtgagaataggcatcccaataatgagcacaacatgacaagtaaagattcttcaagcataaagatcaaaaggcattgttttaggattccacgtgatgcagttgagaggcttcgccaagtttttgctgagaacgaacttcctccaagatctataagagagggtctttcaaaagagctgggccttgacaccgagaaggtcagcaaatggttcaaaaatgcacgttacttagcacttaaaaacagaaagcatcaagcagaaggaggagcagatcagcttcagagtatcacttctacaaagaacagattacaaaaacaggagaatgtcgatcctttgaaatcaaagaccccaaaaattactaggacacattcccagaaggatgttaaaaatgtcaatggaagaaagaaaatgaagtcatctaacaagaaaagacaaccagaaattcctccacctccaggagaaaatggcaagaaggactttatggagatcagtgatgatgtgagcttgaagaaactgttgaagaaaagaaagaagaggttgataaattttacgtttggaggagactctcagttggcagagttggaatttgaaagactaagcgaattgaagactaaagtagatagtatgaagcaaaaattaactgcaattcaaaattacagagttaagggttcaccctattcgaatgaaccatccattgtatatgtacccacagctgtgttaagggaaaaggttgaatga

SEQ ID NO: 226 - protein, 580 aa, Glycine max
  UNSURE (87)..(87): Xaa can be any naturally occurring amino acid
KKKRQRNNIDVDDASRLRRRTRYLLIKMKLEQNLIDAYSGEGWKGQSREKIRPEKELLRAKKQILKCKLSIRDAIHQLDSLSSVGSXEDSAIAPDGSVYHENIFCANCKLHEAFPDNDIILCDGTCNRAFHQRCLNPPLDTENIPPGDQGWFCKFCECKIEILEATNAHLGTQFSLDSNWQDVFKEEAAMPDGDIALLNPEEEWPSDDPEDDDYNPERKEDNHNFDTEGADENASNDSTSCSSLLSLNGECPPVDEGICHEYYSVNSCLDSDESGEIACGPRQRKAVDYKKLYDEMYGKDAPPCEQMSEDEDWGPGKRKRREKESDAVDSLMTLHESENRHPNNEHNMTSKDSSSIKIKRHCFRIPRDAVERLRQVFAENELPPRSIREGLSKELGLDTEKVSKWFKNARYLALKNRKHQAEGGADQLQSITSTKNRLQKQENVDPLKSKTPKITRTHSQKDVKNVNGRKKMKSSNKKRQPEIPPPPGENGKKDFMEISDDVSLKKLLKKRKKRLINFTFGGDSQLAELEFERLSELKTKVDSMKQKLTAIQNYRVKGSPYSNEPSIVYVPTAVLREKVE

SEQ ID NO: 227 - DNA, 1614 bp, Lotus corniculatus
atgcagggtactgagaagttaaatggcacaggatctacaaaatccagtaactcagaggaacatgctgagtcaaaggtagattcattgagatacagaacaaatataacaaaatgccgagggaagaaacaaaaactgaaatcaaaatctcataaactcagcggttgcttaagtgcatcagggaggacagttaccaattcttccatcaagagacaagtaaaggattcttctaataaaaagattattagacaaagtctacataaaactgatggcaaatcttcacggatgctgtcttcaacaatgatacaaggaggaaaatcttctcttggttctagaaaggagggcaaagatgttgatggggaggtaatggttcaaaaagttaaaagaaagagaaagaagaaaaggagacaggatgatgttgatcttgatgatgcttcacgcttactgagaagaacaaggtacctcttaatcaaaatgaagctagagcagaatcttattgatgcttactctggagaaggttggaaaggtcaaagtcgagagaagattaggccagaaaaggagctacaaagagccaagaagcagattttgaattgtaaacttagtattcgggatgccattcgccagttagattctcttagctcattgggcagcattgaagattctgtcattgatccagatggatctgtttatcatgaacatatattctgtgcaaattgcaagttgcgtgaagctttcccagataatgatataatactctgtgatggcacatgcaatcgtgcttttcaccaacggtgtctcaaccctcctttggatactgaaaatattcctcctggagaccaaggctggttctgcaatttttgtgaatgtaagatagaaatattggaggcaacaaatgcccatcttgggactcaaatctccttggacagtacttggcaggatgtattcaaggaggaggctgctatacccgatggtgataatgcattactgaatccagaagaagaatggccatcagatgatcctgaagacgatgattattatccagagaggaaagaagacaaccacagcatcaaagcagaaggaactgatgataatgcatccaatgatttaagcagttcttccagtctagggtctttgaatggtgaatgttctccagtagatgaaggcacgggtcttgaatattattctgttaattgctgcatagattctgatgattctggggaaatagcatgtggccgtaggcagcgtaaatctgttgactacaagaaactatatgatgaaatgtttgggaaggatgctcctccatgtgaactagtgagtgaagatgaagactggggtactggcaaaagaaagcgaagagaaaaagagtctgatgctgttaatactctcatgactatgcatgaaagtgagaacaaaaatcccaataatgagaatagtgatggaataagagagggttcttcaggcaaaccaataagaaggtcttgtttcaggattccacatgatgcacttgagaagcttcgccaagtttttgcggagaatgagcttcctccaagatctgtcaaagaaggtctttcgaaagagttgggaattgatgctgcgaaggttatgccttacaacctc

SEQ ID NO: 228 - protein, 538 aa, Lotus corniculatus
MQGTEKLNGTGSTKSSNSEEHAESKVDSLRYRTNITKCRGKKQKLKSKSHKLSGCLSASGRTVTNSSIKRQVKDSSNKKIIRQSLHKTDGKSSRMLSSTMIQGGKSSLGSRKEGKDVDGEVMVQKVKRKRKKKRRQDDVDLDDASRLLRRTRYLLIKMKLEQNLIDAYSGEGWKGQSREKIRPEKELQRAKKQILNCKLSIRDAIRQLDSLSSLGSIEDSVIDPDGSVYHEHIFCANCKLREAFPDNDIILCDGTCNRAFHQRCLNPPLDTENIPPGDQGWFCNFCECKIEILEATNAHLGTQISLDSTWQDVFKEEAAIPDGDNALLNPEEEWPSDDPEDDDYYPERKEDNHSIKAEGTDDNASNDLSSSSSLGSLNGECSPVDEGTGLEYYSVNCCIDSDDSGEIACGRRQRKSVDYKKLYDEMFGKDAPPCELVSEDEDWGTGKRKRREKESDAVNTLMTMHESENKNPNNENSDGIREGSSGKPIRRSCFRIPHDALEKLRQVFAENELPPRSVKEGLSKELGIDAAKVMPYNL

SEQ ID NO: 229 - DNA, 573 bp, Sorghum propinquum
aactcgagaacaaatgaagaaaaatctggtatatcagggaagattgattcagtagacaactcttgcttggttcccttgtctgaaatcatcaatgtgcatacacgagtgcaccacaatcttgagatgaggaagatggaatcaactagcagtcctgtgtggctgcacaatgaaggaggctgcttgtttccaacactccaagccaaggagagtacattacctacaagcaagccttgtttgccgtcagaaataacccatccaacaactaatgaagtgagcactttagtgcaagctacttcttggatggatgctggggcgtgcattgagcagcaagaaaccactccttgggtggataccggggcctcaggttaccagcctttcctggacgtgattgatgagatgtgcggacttgagtgcaggctgcagaggctgaaggagaacatgttctcatctggcatggacggcagaaccgccggtgtgagtgacatgggaaaccaggctgtggtgcttgtgccgactgctgagctcaaggaaaaagcgccgcatggcggtttatttgggcactattgcccatag

SEQ ID NO: 230 - protein, 190 aa, Sorghum propinquum
NSRTNEEKSGISGKIDSVDNSCLVPLSEIINVHTRVHHNLEMRKMESTSSPVWLHNEGGCLFPTLQAKESTLPTSKPCLPSEITHPTTNEVSTLVQATSWMDAGACIEQQETTPWVDTGASGYQPFLDVIDEMCGLECRLQRLKENMFSSGMDGRTAGVSDMGNQAVVLVPTAELKEKAPHGGLFGHYCP

SEQ ID NO: 231 - DNA, 532 bp, Sorghum propinquum
aagataaaattggagcagaatctactagatgcttactctggagatggatggaatgggcaaagccgggagaaaataaagccagagaaggaactgcagcgtgccaggaaacaaatcataaaatgcaaaattgctatacgtgatatcattcgccaactttgtttgtatacttctactgggagtgttgatgacccagcaatgcctccagatcagtttaccaatcccgaacataccatgtgctcaacatgcaagtctcatgaatcatttcccagcaataaatttatcttctgtgaagggccctgcaaaagggcatatcatgagaaatgtttggaacctcccttaaacaaaggtgtacttccaacaagtagccatggatggctttgcaaattctgtttgtgcaaggtgaaaattttagaaactattaatgcacatctaggaacaagttttacagtgatgtgctcctttgaagatatattcaaggaagcaacagaacaaatagactccgaggatgcactagatgaagattggctctctg

SEQ ID NO: 232 - protein, 177 aa, Sorghum propinquum
KIKLEQNLLDAYSGDGWNGQSREKIKPEKELQRARKQIIKCKIAIRDIIRQLCLYTSTGSVDDPAMPPDQFTNPEHTMCSTCKSHESFPSNKFIFCEGPCKRAYHEKCLEPPLNKGVLPTSSHGWLCKFCLCKVKILETINAHLGTSFTVMCSFEDIFKEATEQIDSEDALDEDWLS

SEQ ID NO: 233 - protein, 180 aa, Oryza sativa
DEVSRMEKRARYLLIKIKQEQNLLDAYSGDGWNGHSREKIKPEKELQRAKKQIMKYKIAIRDVIHQLDLCSSSGSKDDSVIPPDGCHESVNPEHTICSRCKSHESFPDNNIIFCEGGCKLACHQKCLEPPFDKILPTTRHGRLCKHCSSKMKILDAINAHLGTSFTVKCPSSDIFKEAAE

SEQ ID NO: 234 - protein, 50 aa, Oryza sativa
RIPPAAVEVLRKAFAENELPARSVKENLSTELGISFEKIDKWFKNTRCAA

SEQ ID NO: 235 - DNA, 2194 bp, Oryza sativa; identical to SEQ ID NO: 10

SEQ ID NO: 236 - DNA, 56 bp, Artificial sequence
  primer: prm09687
ggggacaagtttgtacaaaaaagcaggcttaaacaatgaataccccagaaaagaaa

SEQ ID NO: 237 - DNA, 50 bp, Artificial sequence
  primer: prm09688
ggggaccactttgtacaagaaagctgggtgatgcaaggttaagatgcttt

SEQ ID NO: 238 - DNA, 2649 bp, Physcomitrella patens
atgatgaagaattaccgtcctccatcaccacttccaagtgctcgccaagctttcttacaagacccggcgtcgtcattccaaatgacaggacgacattgggcagacccagagggaggtggagaacggaagcttcacacacactctcactcacactcactcactcacgaaggaaacgaagggcaaaggaaggggagccccgccgtgagccgagagcggagagcaagcattcccaacggaagtctccgtcaatgcggtgccggagccgacgacgacgacgatgatgggctgagcctgtcatcgcaatggatgcattgccctgtaagtgggaaggtggaggaaggattggggaagaggttgaggaagagaaagagaaagagaaagagtttgttgttgttgttggggaaggggagggggcgacggatgatgcccatgggcgtagtccgcgacgatgagtcccaggccgctgctggctcgccgcctgcgcccacccctcccccaatcgccaagccgacgctgcgatcccactcgcgctccagggcgcacaaggcgcgctcccaacacccgccgctgggcgatggcgatgcgcccttgcccccaccgcaaggaacagcaacaccaggaggaggaggagcagcagcagtgggcgcaccaggggccatggatgccgaggctatggcggcggggcagcggcggcgtcgacgacgccgacgacagcggggcaagaactcggatgtgccgcttgacaatcgcacgcgaattaagaggcgtgtcaagtacttgctcatgaaaatgcgagtcgaccagaacctgctggatgcgtactccggggagggttggaaggggcagaggaattctctttttggcatatccagtcgggaaaagatcaggccggagcaagaactacagcgtgctgaagcgcagatcctgcattcgaaattggccatacgggaggctattcatgaattggataacttggggttagaaggctcgctcgacgaaaatgcatttgatgctgaaggccgtgtttaccatgaagagatattttgtgccaagtgccgatctcaagatgctctacctgacaacgacattattttatgtgacggcgcatgcaacagaggcttccatcagtactgtttagacccacctttagctacgatcaacattcctcctggagacgaagggtggttgtgtcctgtatgtgagtgcaagatggagtgcattgaagttattaatgcatacttgggcacacactttgaggtggagaatagttgggaggagttgttttctgaagaagctctcgtggctgcgggcggtagaactcaaggggtcacagatggtgattttccttcctcagactcagaagacgacgattataaccctgaaggagcggagaagcggacagacagtgaaagcgaaggcgaaagtgatgaaggtgggggagatagtgattcaggaagcgattttagggaaaatgaagcgtctggtagtgacaaagatgagcaagatccaatgcaggcaactaatttagagagacttgcgagaacagcaaagcggaccagcaaggaaggaagtggaggtccagaatcttcaggcagtgatgactcagaagtttttcttgttgatgggtttacggatggtggagtcaaattaggtttaagacgtagagactcacaagcagaagaatcagcttcagacgaggaaaccatggttatagcaggaaaaagacatcgaaaagcagtagactacaagagattacatgatgaaatgtttgggaacatggagattgatgtggacgatatcatatccgaagatgaggattggggtccgaaacgccgtcggagaagaaccattcctgatgacccaagcaggtctagacctcctcgagttcgacggagaaaggcgcgaacctcaactggagatgctttaaaagaagttgatgcagatggggtaccatcagatttaccctctgggtcacaaggcgagggagcagccgatactcttgaagctgttagagacaaacgaatgtggaggaagttgcctgattctgctgttgagacgttacgactggctgcggcagtgacgacactgccctcaaaatcccgtaaagaggagttggcgacacagcttggcttgagtttttcacaagtccatggatggtttaaaaatcagcggtatttagctctcagaaatgggttggcgatttcaaagcgaccagcagctgggcggatggcggccactgtaaccatacaatcggaacacgacaacaattcaagtgcctatttaactgagaagttggatgaagtccaaatgcgactttttgaactgaagcaaactttggaagatttcgctaagaattcatctggtttaggcggtggagaatcagataacagttttgaaaatggaggaattggacttcctgcaaatgggaaacggattatctatgtcccagtggctgaggttagagaacggccttctcttttctctgacagctgtccgctttcattattagcagtgttaaattgcgaggtgaattacaagaggaatctacgtatattcatgtgttcatggcctagctgcttagcgtacggggttttgcatgccaactgcccttgtcatattggatcatgtttcgaaggaataggtgggtga

SEQ ID NO: 239 - protein, 882 aa, Physcomitrella patens
MMKNYRPPSPLPSARQAFLQDPASSFQMTGRHWADPEGGGERKLHTHSHSHSLTHEGNEGQRKGSPAVSRERRASIPNGSLRQCGAGADDDDDDGLSLSSQWMHCPVSGKVEEGLGKRLRKRKRKRKSLLLLLGKGRGRRMMPMGVVRDDESQAAAGSPPAPTPPPIAKPTLRSHSRSRAHKARSQHPPLGDGDAPLPPPQGTATPGGGGAAAVGAPGAMDAEAMAAGQRRRRRRRRQRGKNSDVPLDNRTRIKRRVKYLLMKMRVDQNLLDAYSGEGWKGQRNSLFGISSREKIRPEQELQRAEAQILHSKLAIREAIHELDNLGLEGSLDENAFDAEGRVYHEEIFCAKCRSQDALPDNDIILCDGACNRGFHQYCLDPPLATINIPPGDEGWLCPVCECKMECIEVINAYLGTHFEVENSWEELFSEEALVAAGGRTQGVTDGDFPSSDSEDDDYNPEGAEKRTDSESEGESDEGGGDSDSGSDFRENEASGSDKDEQDPMQATNLERLARTAKRTSKEGSGGPESSGSDDSEVFLVDGFTDGGVKLGLRRRDSQAEESASDEETMVIAGKRHRKAVDYKRLHDEMFGNMEIDVDDIISEDEDWGPKRRRRRTIPDDPSRSRPPRVRRRKARTSTGDALKEVDADGVPSDLPSGSQGEGAADTLEAVRDKRMWRKLPDSAVETLRLAAAVTTLPSKSRKEELATQLGLSFSQVHGWFKNQRYLALRNGLAISKRPAAGRMAATVTIQSEHDNNSSAYLTEKLDEVQMRLFELKQTLEDFAKNSSGLGGGESDNSFENGGIGLPANGKRIIYVPVAEVRERPSLFSDSCPLSLLAVLNCEVNYKRNLRIFMCSWPSCLAYGVLHANCPCHIGSCFEGIGG

SEQ ID NO: 240 - DNA, 2379 bp, Physcomitrella patens
atggtgccgacgggcgtggtggagcgggaggaccagcctgagcctgctgctgcccccccagtgccggtgattacacccaagacgcttcgatcgcactctatcaggacgcagaccacgccaggtgatggcgatgctggtgcggatcatgctcctggagcagtggcagcagcagcagcatcagcaggaggaggaggagcagcggatgtcatgcaaggtaacgatgcggggcaggaacggcgaggacgacggcgcgggcgacggaagaagtcagacgtgccgctcgataatcccacgcgaatcctaaagcatgtcaagtacttgctcattaaaatgcgagtccaccagaacctgctcgatgcgtacacaggggagggttggaagggtcagagtcgcgagaagatcaggccggagcaagaactacaacgtgcgaaggcgcagatactgcgatctaagttggccatacgggaggctattcatgaactcgatgacgtgggtttagaaggttctctcgacaaaaacgcttttgattctgaaggtcgtatttaccatgaagagattttttgtgcgaagtgcaaatcccaagaagctcttcctgacaacgacattatcttgtgcgacggggcgtgcaacagaggcttccatcagtattgcttagacccacctttagctacggaagacattcctcctggagatgaaggatggttatgccctgtatgcgactgcaagatggagtgtattgaagcgataaattcatattttggcaccagttttgaggtcgagaatagttgggagagctttttttcgaacgaagctggtatagctgcaggcggtggaacgcaagaaggggctggtggtgattggccttcctcaggcgatgaagatgatgagtatgatccagaaacagcggaagggccttcttcagcttctgaaagtggagctcaagtaatagggcttgctgttgactggccgtcctcagacgacgaagatcacgactatgatccggaagcagcggaagaacctcctggagcttctgggagtggaactcaaacagtaggtcttgacgttgattggccttccacagacgatgaagatgacgactttgatccagaaggtatcagaaagcaggcaaacagtgacgaagaaagtagtagtgatgaaagtgaggaggacggggaggatagtggttctgtaagcggcttcagggaaaatgaggcgtcttcaggtgtaagtgacaaagatgagcaggagcctagtgaaaaacataatctggagctaactgctgtcactaacatcaagaaacttgcaagaaaaggaaaacgtaacataatcagcaacaaaggaaaaagtgaatatttagagtcttcagacagtgatgattctgatgtctctctttttgacgagttcaagggtggtaatgccaatttaggcttaagacgtggggatccacaggcagcagtatcagcagcagacgaggaagccgtgattattgctgggaaaagacatcggaaagctgtggactacaaaagactacatgatgaaatgtatggtaaagcggaggccgataacgatgacgacgttatctctgaggatgaagattggggtcctgaacgtcgccgaagacgaaccattcctgatgatcctaactcgccaaggtcccgaattcgaggtaggaaagtgagaactccaagtggagatatttctaaaggagccgatgcagatttaccctctggattaccagatatgccatcccactttcccactggttcacaaggtgaagtaggctcaccacaagacattccagcactagatggagcagctgacagtcctggaggagaaaagcggatgtggcggcgattgcctgattccgcagtcgaggcattacggtgtattcttgatgttaataggctgccctcaaaatctcggaaggaagaattagcaattaagcttgggttgagcttttcacaggttcatggatggtttaaaaatcagcggcatcaagctctgaggaaagggttggcatgtcctaagcggatacatccagtagcatcaagctcaagagatttcaatactgtcgaatctccatcgtctgtggcgactttaactgaaagcacattaccgcaaaaagagaatgctccaaattctattttaactgagaagttggacgaagttcaggtgcgactcctcgaattgaagcaagcgttggacgattttaccaagaatgcagcagtggttgcggatggcggaagtattgaattggataacaacgtggaaaacggaggaattggacttcctgaaaatggaaaacgtgttgtctatgtgccagttgtggccgacgttagggaacaatcaccaatgagtacgcatactagcgcatgttga

SEQ ID NO: 241 - protein, 792 aa, Physcomitrella patens
MVPTGVVEREDQPEPAAAPPVPVITPKTLRSHSIRTQTTPGDGDAGADHAPGAVAAAAASAGGGGAADVMQGNDAGQERRGRRRGRRKKSDVPLDNPTRILKHVKYLLIKMRVHQNLLDAYTGEGWKGQSREKIRPEQELQRAKAQILRSKLAIREAIHELDDVGLEGSLDKNAFDSEGRIYHEEIFCAKCKSQEALPDNDIILCDGACNRGFHQYCLDPPLATEDIPPGDEGWLCPVCDCKMECIEAINSYFGTSFEVENSWESFFSNEAGIAAGGGTQEGAGGDWPSSGDEDDEYDPETAEGPSSASESGAQVIGLAVDWPSSDDEDHDYDPEAAEEPPGASGSGTQTVGLDVDWPSTDDEDDDFDPEGIRKQANSDEESSSDESEEDGEDSGSVSGFRENEASSGVSDKDEQEPSEKHNLELTAVTNIKKLARKGKRNIISNKGKSEYLESSDSDDSDVSLFDEFKGGNANLGLRRGDPQAAVSAADEEAVIIAGKRHRKAVDYKRLHDEMYGKAEADNDDDVISEDEDWGPERRRRRTIPDDPNSPRSRIRGRKVRTPSGDISKGADADLPSGLPDMPSHFPTGSQGEVGSPQDIPALDGAADSPGGEKRMWRRLPDSAVEALRCILDVNRLPSKSRKEELAIKLGLSFSQVHGWFKNQRHQALRKGLACPKRIHPVASSSRDFNTVESPSSVATLTESTLPQKENAPNSILTEKLDEVQVRLLELKQALDDFTKNAAVVADGGSIELDNNVENGGIGLPENGKRVVYVPVVADVREQSPMSTHTSAC

SEQ ID NO: 242 - DNA, 2166 bp, Zea mays
atgcattcttcggaaaataaactgggttggaatgagacctctatggggttggttcctgtaccaaaaagaccagctagacctgatgcttcccaccaatgcaaatctgattcctttatgaagcgatcaccaaggaaagttagaaatgctactctggcaaaaagcataaagagcaaataccactatagtcccctcaaacagcggaagggttcagattctgttcctgggaaaatcgtaacaggactaaccgcaaggaaaaagaagaaaaggaaaatccaaattacagacgaggcaactcgtttggaacgaagagcgagatattttctaatcaagataaaactggagcagaatttgctagatgcttactctggagatggatggaatgggcaaagccgagagaaaataaagccagagaaggaactgcaacgtgccaggaaacaaatcataaaatgcaaaattgctatacgtgatatcatccgccaacttgatttgtatacttctactgggagtgttgatgacccactaatgcctacagatcagtccaccaatcccgaacataccatgtgctcaacatgcaagtctcatgaatcatttcccagcaataaaattatcttctgcaaagggccctgcaaaagggcatgtcatgagaaatgtttggaacctcccttaaacaaaagcgtacttccaacaagtagccatgggtggctttgcaaattctgtttgtgcaaggtgaggattttagaaactattaatgcacatctagggacgagttttacagtgaagtgccactttgaagatatattcaaggaaactactgaactaatagactctgaggatgcactagatgaagattggctttctgagtattcaggtgatgaggactatgatcctgatgaaaatgaggccagtggcgactgtatggacagcggggagaagattatgtctgatgattccaatggttcaggaagccccctttattctccaaatgacgatattcctgacttcatatcagcagacttaaatgttgtggaagggttttgtcataccaatttagatttaggcattgatgccgttgaagatgattttgcacagatcctcacctaccaaaggccaagaagagatgttgattatagaaggcttaacgaggaaatgtttgggaaaataaccgggaatgaagaacagagcgaggacgaagattggggccatgaaaggagaaagaaaaggacgcattcaggtgttgctggggataattctgttggtttcttgaacgttatatctgatgaaaagagccagaagaaggggagaaaacttttcaggattcctcctgcagctgttgaggtacttcgcagagcttttgctgaaaatgagcttccaccccgggatgttaaagaaaatctctcaagagaattgggaatttcttttgaaaagattgataaatggttcaaaaatacacggtgtgctgctctcagagatcggaaggctgaaggaaacagtcataatacagctcccagcaaaatctcaaaaaataaaggaaaagctggaatctcaggcaaggctggaaggaatggtcatgttactggtccctgcaataatttgagaataaatgaagaaaaaacaggtatatcggggaagtttgattcaggagacaactcttgtttggttcccttctctgaagtcatcaatgtgcctacgcgattgccacacaactttgagatgaggaagatggaatcaactagaagtcctgcgaggctacacaataaaggagggtgcctgtctgcaacaatccaaattaaggagagtacattgttacccacaggcaagccttgttggcagtcagaaatgagccatccaacaactaatgaagtgagcacttcagcgcaagctactacttggatcgacgcgggggcgtgtgccgaggagcaagaacctactccttgggtggacatcggggcctcagactaccagcctttcctggatgtgatcgacgacatgtgcggacttgagtggaggctgcagagactgaaggagaacatgctctcatctagcatagacggccaaaccgccgccagtgagagtgacaaaagaaaccagaccgtggtgctcgtgccaactgccgagctcaaggaaaaactgccgcatgacggtttattcgggcattattgcccatag

SEQ ID NO: 243 - protein, 721 aa, Zea mays
MHSSENKLGWNETSMGLVPVPKRPARPDASHQCKSDSFMKRSPRKVRNATLAKSIKSKYHYSPLKQRKGSDSVPGKIVTGLTARKKKKRKIQITDEATRLERRARYFLIKIKLEQNLLDAYSGDGWNGQSREKIKPEKELQRARKQIIKCKIAIRDIIRQLDLYTSTGSVDDPLMPTDQSTNPEHTMCSTCKSHESFPSNKIIFCKGPCKRACHEKCLEPPLNKSVLPTSSHGWLCKFCLCKVRILETINAHLGTSFTVKCHFEDIFKETTELIDSEDALDEDWLSEYSGDEDYDPDENEASGDCMDSGEKIMSDDSNGSGSPLYSPNDDIPDFISADLNVVEGFCHTNLDLGIDAVEDDFAQILTYQRPRRDVDYRRLNEEMFGKITGNEEQSEDEDWGHERRKKRTHSGVAGDNSVGFLNVISDEKSQKKGRKLFRIPPAAVEVLRRAFAENELPPRDVKENLSRELGISFEKIDKWFKNTRCAALRDRKAEGNSHNTAPSKISKNKGKAGISGKAGRNGHVTGPCNNLRINEEKTGISGKFDSGDNSCLVPFSEVINVPTRLPHNFEMRKMESTRSPARLHNKGGCLSATIQIKESTLLPTGKPCWQSEMSHPTTNEVSTSAQATTWIDAGACAEEQEPTPWVDIGASDYQPFLDVIDDMCGLEWRLQRLKENMLSSSIDGQTAASESDKRNQTVVLVPTAELKEKLPHDGLFGHYCP

SEQ ID NO: 244 - DNA, 846 bp, Triticum aestivum
atggcggggcagccgccgcagggcccggaggacgacttcctcgaccagttcttctccctcaccaactccctctccgccgccggccgcccctccggcgaccagcccttctccctcgccctcagcctcgacgccgcctcggacgcctccggcagcaggggcggcatcggcgacgacgccggcaacgccgcggagcgggacggcgtgcagctccccggcctcttcccgccggtgttcggcggtggcctccagccgccgcaccttcgccccagccaccctcccccacagatgttccacgcgcagcagccgaagcagggcgggccggctggagggccgcagccgccggcgccgaggccgaaggtgcgggcgcgtcgcggtcaggcgactgatccccacagcatcgcggagaggctaagaagagagaggatagcggaaaggatgagggccctacaggaattggtccccaatacgaacaagacagatagggcagttatgctagatgagatcctggattatgtgaagttccttaggcttcaagtaaaggtgttaagcatgagcagattgggtggtgctggtgctgttgcacagctggtttctgacattccactttcagttaagggggaagcaagcgatggtgggagcaaacagcagatatgggaaaagtggtcaacggatggcacggaaaaacaggttgcgaagctgatggacgaggacatcggtgccgcaatgcaatttctccaatcaaaggctctctgcatgatgccagtctcccttgccatggctatctatgacacacaacattcacaggacggccaaccagtgaagcctgaacccaacaacactgcctag

SEQ ID NO: 245 - protein, 281 aa, Triticum aestivum
MAGQPPQGPEDDFLDQFFSLTNSLSAAGRPSGDQPFSLALSLDAASDASGSRGGIGDDAGNAAERDGVQLPGLFPPVFGGGLQPPHLRPSHPPPQMFHAQQPKQGGPAGGPQPPAPRPKVRARRGQATDPHSIAERLRRERIAERMRALQELVPNTNKTDRAVMLDEILDYVKFLRLQVKVLSMSRLGGAGAVAQLVSDIPLSVKGEASDGGSKQQIWEKWSTDGTEKQVAKLMDEDIGAAMQFLQSKALCMMPVSLAMAIYDTQHSQDGQPVKPEPNNTA

SEQ ID NO: 246 - protein, 6 aa, Artificial sequence
  motif 1
  VARIANT (1)..(1): /replace = "Asp"
  VARIANT (2)..(2): /replace = "Ser" /replace = "Glu"
  VARIANT (3)..(3): /replace = "Met"
  VARIANT (4)..(4): /replace = "Phe"
  VARIANT (5)..(5): /replace = "Glu" /replace = "Gln" /replace = "Leu"
  VARIANT (6)..(6): /replace = "His" /replace = "Glu"
EDFLDQ

SEQ ID NO: 247 - protein, 16 aa, Artificial sequence
  motif 2
  VARIANT (3)..(3): /replace = "Ile" /replace = "Gln"
  VARIANT (6)..(6): /replace = "His"
RARRGQATDPHSIAER

SEQ ID NO: 248 - protein, 9 aa, Artificial sequence
  motif 3
  VARIANT (1)..(1): /replace = "Ile" /replace = "Val" /replace = "Leu"
  VARIANT (2)..(2): /replace = "Arg"
  VARIANT (3)..(3): /replace = "Ser" /replace = "Gln" /replace = "Asp" /replace = "Asn"
  VARIANT (6)..(6): /replace = "Asp" /replace = "Val"
MKALQELVP

SEQ ID NO: 249 - protein, 17 aa, Artificial sequence
  motif 4
  VARIANT (1)..(1): /replace = "Ile"
  VARIANT (2)..(2): /replace = "Ile"
  VARIANT (6)..(6): /replace = "Val" /replace = "Leu"
  VARIANT (7)..(7): /replace = "Glu" /replace = "Gly"
  VARIANT (9)..(9): /replace = "Leu" /replace = "Ile"
  VARIANT (10)..(10): /replace = "Arg"
  VARIANT (13)..(13): /replace = "Arg"
  VARIANT (16)..(16): /replace = "Ile"
MLDEIIDYVKFLQLQVK

SEQ ID NO: 250 - protein, 8 aa, Artificial sequence
  motif 5
  VARIANT (1)..(1): /replace = "Ile"
  VARIANT (7)..(7): /replace = "Val"
VLSMSRLG

SEQ ID NO: 251 - protein, 16 aa, Artificial sequence
  motif 6
  VARIANT (2)..(2): /replace = "Val" /replace = "Leu" /replace = "Ile"
  VARIANT (3)..(3): /replace = "Arg"
  VARIANT (4)..(4): /replace = "Met"
  VARIANT (5)..(5): /replace = "Leu"
  VARIANT (6)..(6): /replace = "Asp"
  VARIANT (7)..(7): /replace = "Asp" /replace = "Ser" /replace = "Lys" /replace = "Thr"
  VARIANT (8)..(8): /replace = "Asn" /replace = "Ser"
  VARIANT (9)..(9): /replace = "Val" /replace = "Ile"
  VARIANT (10)..(10): /replace = "Val" /replace = "Ile"
  UNSURE (11)..(11): Xaa is an unknown amino acid
  VARIANT (15)..(15): /replace = "Leu" /replace = "Phe"
VAKLMEEDMGXAMQYL

SEQ ID NO: 252 - protein, 6 aa, Artificial sequence
  motif 7
  VARIANT (1)..(1): /replace = "Val"
  VARIANT (2)..(2): /replace = "Ser"
  VARIANT (3)..(3): /replace = "Val"
  VARIANT (4)..(4): /replace = "Thr" /replace = "Ala"
MPISLA

SEQ ID NO: 253 - protein, 51 aa, Artificial sequence
  motif 8
SIAERLRRERIAERMRALQELVPNTNKTDRAVMLDEILDYVKFLRLQVKVL

SEQ ID NO: 254 - DNA, 50 bp, Artificial sequence
  primer: prm009718
  misc_feature (47)..(47): n is a, c, g, or t
ggggacaagtttgtacaaaaaagcaggcttaaacaatggcggggcanccg

SEQ ID NO: 255 - DNA, 50 bp, Artificial sequence
  primer: prm009719
ggggaccactttgtacaagaaagctgggtatgggtgttgcagctgctgtt

SEQ ID NO: 256 - DNA, 2194 bp, Oryza sativa; identical to SEQ ID NO: 10

SEQ ID NO: 257 - DNA, 3093 bp, Artificial sequence
  expression cassette
aatccgaaaagtttctgcaccgttttcaccccctaactaacaatatagggaacgtgtgctaaatataaaatgagaccttatatatgtagcgctgataactagaactatgcaagaaaaactcatccacctactttagtggcaatcgggctaaataaaaaagagtcgctacactagtttcgttttccttagtaattaagtgggaaaatgaaatcattattgcttagaatatacgttcacatctctgtcatgaagttaaattattcgaggtagccataattgtcatcaaactcttcttgaataaaaaaatctttctagctgaactcaatgggtaaagagagagattttttttaaaaaaatagaatgaagatattctgaacgtattggcaaagatttaaacatataattatataattttatagtttgtgcattcgtcatatcgcacatcattaaggacatgtcttactccatcccaatttttatttagtaattaaagacaattgacttatttttattatttatcttttttcgattagatgcaaggtacttacgcacacactttgtgctcatgtgcatgtgtgagtgcacctcctcaatacacgttcaactagcaacacatctctaatatcactcgcctatttaatacatttaggtagcaatatctgaattcaagcactccaccatcaccagaccacttttaataatatctaaaatacaaaaaataattttacagaatagcatgaaaagtatgaaacgaactatttaggtttttcacatacaaaaaaaaaaagaattttgctcgtgcgcgagcgccaatctcccatattgggcacacaggcaacaacagagtggctgcccacagaacaacccacaaaaaacgatgatctaacggaggacagcaagtccgcaacaaccttttaacagcaggctttgcggccaggagagaggaggagaggcaaagaaaaccaagcatcctccttctcccatctataaattcctccccccttttcccctctctatataggaggcatccaagccaagaagagggagagcaccaaggacacgcgactagcagaagccgagcgaccgccttctcgatccatatcttccggtcgagttcttggtcgatctcttccctcctccacctcctcctcacagggtatgtgcctcccttcggttgttcttggatttattgttctaggttgtgtagtacgggcgttgatgttaggaaaggggatctgtatctgtgatgattcctgttcttggatttgggatagaggggttcttgatgttgcatgttatcggttcggtttgattagtagtatggttttcaatcgtctggagagctctatggaaatgaaatggtttagggatcggaatcttgcgattttgtgagtaccttttgtttgaggtaaaatcagagcaccggtgattttgcttggtgtaataaagtacggttgtttggtcctcgattctggtagtgatgcttctcgatttgacgaagctatcctttgtttattccctattgaacaaaaataatccaactttgaagacggtcccgttgatgagattgaatgattgattcttaagcctgtccaaaatttcgcagctggcttgtttagatacagtagtccccatcacgaaattcatggaaacagttataatcctcaggaacaggggattccctgttcttccgatttgctttagtcccagaattttttttcccaaatatcttaaaaagtcactttctggttcagttcaatgaattgattgctacaaataatgcttttatagcgttatcctagctgtagttcagttaataggtaatacccctatagtttagtcaggagaagaacttatccgatttctgatctccatttttaattatatgaaatgaactgtagcataagcagtattcatttggattattttttttattagctctcaccccttcattattctgagctgaaagtctggcatgaactgtcctcaattttgttttcaaattcacatcgattatctatgcattatcctcttgtatctacctgtagaagtttctttttggttattccttgactgcttgattacagaaagaaatttatgaagctgtaatcgggatagttatactgcttgttcttatgattcatttcctttgtgcagttcttggtgtagcttgccactttcaccagcaaagttcatttaaatcaactagggatatcacaagtttgtacaaaaaagcaggcttaaacaatggcggggcagccgccgcagggcccggaggacgacttcctcgaccagttcttctccctcaccaactccctctccgccgccggccgcccctccggcgaccagcccttctccctcgccctcagcctcgacgccgcctcggacgcctccggcagcaggggcggcatcggcgacgacgccggcaacgccgcggagcgggacggcgtgcagctccccggcctcttcccgccggtgttcggcggtggcctccagccgccgcaccttcgccccagccaccctcccccacagatgttccacgcgcagcagccgaagcagggcgggccggctggagggccgcagccgccggcgccgaggccgaaggtgcgggcgcgtcgcggtcaggcgactgatccccacagcatcgcggagaggctaagaagagagaggatagcggaaaggatgagggccctacaggaattggtccccaatacgaacaagacagatagggcagttatgctagatgagatcctggattatgtgaagttccttaggcttcaagtaaaggtgttaagcatgagcagattgggtggtgctggtgctgttgcacagctggtttctgacattccactttcagttaagggggaagcaagcgatggtgggagcaaacagcagatatgggaaaagtggtcaacggatggcacggaaaaacaggttgcgaagctgatggacgaggacatcggtgccgcaatgcaatttctccaatcaaaggctctctgcatgatgccagtctcccttgccatggctatctatgacacacaacattcacaggacggccaaccagtgaagcctgaacccaacaacactgcctag

SEQ ID NO: 258 - protein, 285 aa, Allium cepa
MASNNNPQPPSDGLNDDFFDQIFSMPSAFAASSASTDATEALNYADSSTTGVTPMFSLGLSLDQQPKSDSSQSEREHPVQFACLFPQYGHNNQVHQTRPNLSPPQVLHGQAMQSSMAATPQPTGPRPRVRARRGQATDPHSIAERLRRERIAERIRALQELVPSTNKTDRAVMLDEIVEYVKFLRLQVKVLSMSRLGGAGAVAQLVADIPMSSSVEGDSSESGKTSYQGWEKWSTDGTERQVAKLMEEDVGAAMQFLQSKALCIMPISLAAAICQTNPSTEISFM

SEQ ID NO: 259 - protein, 302 aa, Arabidopsis thaliana
MANNNNIPHDSISDPSPTDDFFEQILGLSNFSGSSGSGLSGIGGVGPPPMMLQLGSGNEGNHNHMGAIGGGGPVGFHNQMFPLGLSLDQGKGHGFLKPDETGKRFQDDVLDNRCSSMKPIFHGQPMSQPAPPMPHQQSTIRPRVRARRGQATDPHSIAERLRRERIAERIRSLQELVPTVNKTDRAAMIDEIVDYVKFLRLQVKVLSMSRLGGAGAVAPLVTEMPLSSSVEDETQAVWEKWSNDGTERQVAKLMEENVGAAMQLLQSKALCIMPISLAMAIYHSQPPDTSSSIVKPEMNPPP

SEQ ID NO: 260 - protein, 310 aa, Arabidopsis thaliana
MASNNPHDNLSDQTPSDDFFEQILGLPNFSASSAAGLSGVDGGLGGGAPPMMLQLGSGEEGSHMGGLGGSGPTGFHNQMFPLGLSLDQGKGPGFLRPEGGHGSGKRFSDDVVDNRCSSMKPVFHGQPMQQPPPSAPHQPTSIRPRVRARRGQATDPHSIAERLRRERIAERIRALQELVPTVNKTDRAAMIDEIVDYVKFLRLQVKVLSMSRLGGAGAVAPLVTDMPLSSSVEDETGEGGRTPQPAWEKWSNDGTERQVAKLMEENVGAAMQLLQSKALCMMPISLAMAIYHSQPPDTSSVVKPENNPPQ

SEQ ID NO: 261 - protein, 831 aa, Arabidopsis thaliana
MMNSSLLTPSSSSSSHIQTPSTTFDHEDFLDQIFSSAPWPSVVDDAHPLPSDGFHGHDVDSRNQPIMMMPLNDGSSVHALYNGFSVAGSLPNFQIPQGSGGGLMNQQGQTQTQTQPQASASTATGGTVAAPPQSRTKIRARRGQATDPHSIAERLRRERIAERMKALQELVPNGNKTDKASMLDEIIDYVKFLQLQVKVLSMSRLGGAASVSSQISEAGGSHGNASSAMVGGSQTAGNSNDSVTMTEHQVAKLMEEDMGSAMQYLQGKGLCLMPISLATAISTATCHSRNPLIPGAVADVGGPSPPNLSGMTIQSTSTKMGSGNGKLNGNGVTERSSSIAVKEAVSVSKAATGMQFDESDARVWIWFEIRREDDIVELLWQSGQVVGTNQTHRQSYDPPPILRGSGSGRGEENAPLSQPPPHLHQQNLFIQEGEMYSWLHHSYRQNYFCSELLNSTPATHPQSSISLAPRQTIATRRAENFMNFSWLRGNIFTGGRVDEAGPSFSVVRESMQVGSNTTPPSSSATESCVIPATEGTASRVSGTLAAHDLGRKGKAVAVEAAGTPSSGVCKAETEPVQIQPATESKLKAREETHGTEEARGSTSRKRSRTAEMHNLAERRRREKINEKMKTLQQLIPRCNKVESDSVSTLISLLKFQRWMMLSSTSNRYRAKYKYALQNRMCFKPMVQHGKSSYVSSFVEMMSTGQGMMSPMMNAGNTQQFMPHMAMDMNRPPPFIPFPGTSFPMPAQMAGVGPSYPAPRYPFPNIQTFDPSRVRLPSPQPNPVSNQPQFPAYMNPYSQFAGPHQLQQPPPPPFQVTLYHGIHCVVAGNPYV

SEQ ID NO: 262 - protein, 310 aa, Arabidopsis thaliana
MNSSSLLTPSSSPSPHLQSPATFDHDDFLHHIFSSTPWPSSVLDDTPPPTSDCAPVTGFHHHDADSRNQITMIPLSHNHPNDALFNGFSTGSLPFHLPQGSGGQTQTQSQATASATTGGATAQPQTKPKVRARRGQATDPHSIAERLRRERIAERMKSLQELVPNGNKTDKASMLDEIIDYVKFLQLQVKVLSMSRLGGAASASSQISEDAGGSHENTSSSGEAKMTEHQVAKLMEEDMGSAMQYLQGKGLCLMPISLATTISTATCPSRSPFVKDTGVPLSPNLSTTIVANGNGSSLVTVKDAPSVSKP

SEQ ID NO: 263 - protein, 297 aa, Arabidopsis thaliana
MENGNGEGKGEFINQNNDFFLDSMSMLSSLPPCWDPSLPPPPPPPQSLFHALAVDAPFPDQFHHPQESGGPTMGSQEGLQPQGTVSTTSAPVVRQKPRVRARRGQATDPHSIAERLRRERIAERMKSLQELVPNTNKTDKASMLDEIIEYVRFLQLQVKVLSMSRLGGAGSVGPRLNGLSAEAGGRLNALTAPCNGLNGNGNATGSSNESLRSTEQRVAKLMEEDMGSAMQYLQGKGLCLMPISLATAISSSTTHSRGSLFNPISSAVAAEDSNVTATAVAAPEASSTMDDVSASKA

SEQ ID NO: 264 - protein, 351 aa, Aquilegia vulgaris
MANNNNPTEGLTDDFLDQILSYGAHEGNLAGNDVNLAGTTTPGGSMALQLSSSGGDITGSGGYHHHHQHQHHHQLSGGGGGFPLGLSLEQSGKGGFFKPDEASGSGKRFRDDFVDLKAVSSTNNDNNDRGDSVHLNNLFPAFGHVQQQQQAHSVRPPSHQNQINQPFLGHPTPGAVAVVPHPPAIRPRVRARRGQATDPHSIAERLRRERIAERMKALQELVPSSNKTDRAAMLDEIVDYVKFLRLQVKVLSMSRLGGAGAVAQLVADIPLSSAEGGASEGGSNQPAWEKWSTDGTEHQVAKLMEEDVGAAMQFLQSKALCIMPISLASAIYHDQPPDASTMIKPEPNAPS

SEQ ID NO: 265 - protein, 205 aa, Aquilegia vulgaris
MKNLQELVPNSNKTDKASMLDEIIEYVRFLQLQVKVLSMSRLGATGAVVPLITENQPEGSTSHFLSQSAGRDVKHIESPNTLTFEQEVVKLMESNMTKAMQFLQRKGLCLMPIALAAAISGSKAPPASLSTEGKKSILTNGFVHHNSGQSNIGPGQISSDGETRSEENIIGIHSREDFSSNSCSGTSIKKEGTNTTNFTREMNQE

SEQ ID NO: 266 - protein, 278 aa, Brassica napus
HASETPSDDFFEQILGLPNFSASSSDGGLGGGGAPPMMLQLGSGEEGGHMGGLGGGSGFHNQMFPLGLSLEQGKGQGFLRPEGGSLGTGKRFSDDVMKPVFHGQPMQQQPAPAAPHQPTSIRPRVRARRGQATDPHSIAERLRRERIAERIRALQELVPTVNKTDRAAMIDEIVDYVKFLRLQVKVLSMSRLGGAGAGAPLVTDMPLSSSVEDESGEGGRAPQPAWEKWSNDGTERQVAKLMEENVGAAMQLLSSKALCMMPISLAMAIYHSQPPDTT

SEQ ID NO: 267 - protein, 345 aa, Citrus clementina
MFLQLGSGGPSPGAGGGATSAADIRSLAMGISMGMMPLGLNLEHSFLRQHEDHNSNHNNNNNTNASSSSPNNSSATSGINERDSVHMPSLFPAFGQLQSQSARPPLPRPPQVQQFQSQPAAAPQPPAVRPRVRARRGQATDPHSIAERLRRERIADRMRALQELVPSCNKTDRAAMLDEIVDYVKFLRLQVKVLSMSRLGAAGAVAQLVADVPLSSALEGESIDGGSSQPEWEKWSNDGTEQQVAKLMEEDIGAAMQFLQSKALCIMPISLASAIYRTRQPDAPAFVKPESSTPSYCLNNNWSQQLAHNDSKYLITGTYSYRILLVLLSNQIIQIPMQRSHSSFP

SEQ ID NO: 268 - protein, 410 aa, Curcuma longa
MQPSSKETERMAQSHAALQLELQNGGGGAQNDDFFEQTMSGFSTAAWAPELGTPRSLFGARSSEESPDDEGLNYAPPYGGSSLLASRHRMHLGTSPADSSMFLQLGGQILLHPTAGASGGESGGFLRLPLSLGSGGSGVSTSAIFGDRSRGEIDPPFESSNPTEAEVLYNDGFTGSLPRAVQASLHQQLLRQPQNYGAATLTGQALAITATASGTAGAGTAPPKPRVRARRGQATDPHSIAERLRRERIAERMKALQELVPNANKTDKASMLDEIIDYLKFLQLQVKVLSMSRLGGAAAVAPLVADMSSESGGGAGTPRSNNDGLTAAEQQVAKLLEEDMGSAMQYLQGKGLCLMPISLASAISSATCRPRPPPGVNLRYPAAGDAPPSPSISALTVQSSNAGSAGADAS

SEQ ID NO: 269 - protein, 281 aa, Citrus paradisi hybrid
MANNPNEASSTDDFLEQILGIPNFGSAESGLAASDGGLAAGSPMMLQLSSGDGSSHISALGGGVSSGYHGQVFPLGLSLEQGKGGFLKPEEASGSGKRFPEEHAIKNVFHGQPLPSPVPAAPHPPAMRPRVRARRGQATDPHSIAERLRRERIAERIRALQELVPSVNKTDRAAMLDEIVDYVKFLRLQVKVLSMSRVGAPGAVAPLVTTDLPLSSVEDESGEGVRNQPAWEKWSNDGTERQVAKLMEENVGAAMQFLQSKALCIMPISLATAIYHSQPPE

SEQ ID NO: 270 - protein, 469 aa, Citrus sinesis
MQPCSSGGEMQGISSLLSNGSHEQQSQIHQSATFDPTSQDDFLEQMLSSLPSCSWTDLKSPWGVVDLNPNNNNNNINNKQPRDLSDETAPSTTQENNVPAGFQFDESMILASKMRQHQISGNTGSGNNNSAAAKFMMQQQQQQIMMAAARGGIGLPLSLGNGGDNDIVDVSSFKSQQGGDGSVQALYNGFTGSLHGSTQPQHFHHLQGGSMPGQTFGAPGPVMNQTQAQASGSTGGGGGGGNTPAQQPKQRVRARRGQATDPHSIAERLRRERIAERMKALQELVPNANKTDKASMLDEIIDYVKFLQLQVKVLSMSRLGGAAAVAPLVADMSSEGGGGDCIQANGRNPNGAQTTSANDSLTVTEHQVAKLMEEDMGSAMQYLQGKGLCLMPISLATAISTATCHSRNPIISTSNNNNNNGNPHHNPLLQSNGEGPTSPSMSVLTVQSATMGNGGADGSVKDAASVSKP

SEQ ID NO: 271 - protein, 320 aa, Eucalyptus grandis
MAGSNPQEGLGDEFFEQILAVPPGAYSGGSTPMVLQLGSGRGGVEDGGGRGGGGGLRGMGVMMPLGLNLEQGGLFRHEDVENSTSASSTTSAINMEREAGVHHGNNMTSCLFPAFGQFQTHQSVQPPPPHPPPPQLHPAFLNQPAVGSPNQPAIRPRARARRGQATDPHSIAERLRRERINERMKALQELVPSCNKTDRAAMLDEIVDYVKFLRLQVKVLSMSRLGGAGAVAQLVADVPLSSAEGEIIEGGNNQPAWEKWLTDGTEQQVAKLMEEDVGAAMQFLQSKTLCIMPISLASAIFRTSQPDMPRSIKPESSAPS

SEQ ID NO: 272 - protein, 346 aa, Eucalyptus grandis
MANNPSDGASDEFLEHLLGLPNFAAAAEAGLAPGDGTGLSVTAATPMMLQLGSGDGSGGHGHGHGHGHGQGHLSALGGGGAGAGGGGGGGGGGYHGAVFPLGLSLEQGKGGFLKPEEASGSGKRYPEEVVDGRASTVKNLHSPLPNFPDVSQMASFRNRDVFHGQPVPNPVPAAPHPPAMRPRVRARRGQATDPHSIAERLRRERIAERIRQLQDLVPSVNKTDRAAMLDEIVDYVKFLRLQVKVLSMSRLGAAGAVAPLVTDIPLSSVEEEGGEGGRNQPAWEKWSNDGTERQVAKLMEENVGAAMQFLQSKALCIMPISLATAIYQTQPPDTSSLVKSESNPPS

SEQ ID NO: 273 - protein, 265 aa, Gossypium hirsutum
DSGGGGFRGIGMMPLGLNLEHGFLRHEDGVVVDNNNNNASCSAASAVSGISERDSMHMVSLFPPFGQMQTQQIRASPPPPQPPPQLHQPFHSQPTSGPVAAAPHPPAVRPRVRARRGQATDPHSIAERLRRERIAERMKALQELVPSCNKTDRAAMLDEIVDYVKFLRLQVKVLSMSRLGAAGAVAQLVADVPLLSVEGDGAGGGTQPPWEKWSNDGTEQQVAKLMEEDIGAAMQFLQSQALCIVPISLASAIFPAHQPDAPTIV

SEQ ID NO: 274 - protein, 306 aa, Gossypium hirsutum
MISNGGESSEFRRSFTGLETLSPIPQLWHLQPYDSVSSLPTLVGQTIVDDEGNINRFIEIDEILQPENLSASINSKGQQDMQNSFCSSFPADHPITKTMIGLPSLVQGASPNLNNGSDRTVKPRVRARRGQATDPHSIAERLRREKIAERMKNLQELVPNSNKTDKASILDEIIGYVKFLQLQVKVLSMSRLGAAAAVVPLITDGRAEVSNGLSLAPLAGQGVDFSPSPDQVVFEQEVVKLMESNMTMAMQYLQSKGFCLMPVALAAAISNVKSSTSSSSSSVPASDESKKLGLHQQYSNQQHLQQ

SEQ ID NO: 275 - protein, 303 aa, Gossypium hirsutum
MANNPNESPADDFLEQILGLSHFAPTETGLAGPDGRLSGNATTAGAPMLLQLSSGGGTGHIGAIGGGGGGAFHGQVFPLGLSLEQGKGGFLKPEEASGSSKRFRNEVVDGRAFSVKNVFHGQPVPATVAAGPHPPAMHPRVRARRGQATDPHSIAERLRRERIAERIRALQELVPSVNKTDRAAMLDEIVDYVKFLRLQVKVLSMSRLGAAGAVAPLVTDLPLSSVEDESGEGGRSQPAWEKWSNDGTERQVAKLMEEDVGAAMQFLQSKALCVMPISLATAIYHTQSPDTSSVVKPETNPPS

SEQ ID NO: 276 - protein, 304 aa, Gossypium hirsutum
MANNTNEAPAADDFLEQILGLPNFAPSETGLAGSDAGLAATAAGAGAPMFLQLSSGDGAAHIGGIGGGGGGAFHGQVFPLGLSLEQGKGGFLKPEEASGSGKRFRNGVVDDRASSVKNVFHGQPMQATVSAAPHPPTMRPRVRARRGQATDPHSIAERLRRERITERIRALQELVPSVNKTDRAVMLDEIVDYVKFLRLQVKVLSMSRLGGAGAVAPLVTDIPLSSVEYESGEGGRSQPAWEKWSNDGTEQQVAKLMEENVGAAMQFLQSKSLCIMPISLATAIYHTQVPDTSSVVKPETNPPA

SEQ ID NO: 277 - protein, 305 aa, Gossypium hirsutum
MANNPNEASADDFLEQILGFPNFAPSETGLAGPDGGLTGTTAGAGTPMFLQLSSGDGASHLGGIGGGGGGAFPGQVFPLGLSLDQGKSGGFLKPEEGSGGSSRRFRDEVVDGRASSVKNVFHGSPMPATVAPSPHPPTMRPRVRARRGQATDPHSIAERLRRERIAERIRALQELVPSVNKTDRAVMLDEIVDYVKFLRLQVKVLSMSRLGGAGAVAPLVTDIPLSSVEDESGDGGRNQPAWEKWSNDGTERQVAKLMEENVGAAMQFLKSKALCIMPISLATAIYHSQPLDTSSIVKPETDPPP

SEQ ID NO: 278 - protein, 427 aa, Gossypium hirsutum
MQPCSREMQAMNSLLNPTQQIPLQDLQINGNRHHHQQIHVPSSSQFQYPTPTSTTHHDDSFLEQILSSTTSFPWSDETGPPNPEDNNNAGFNYDEMVLASKLRQHQINGGAAGNPFAAMKMMLMMQQQQQQQQMMLAGRPTVASAAAGGGITTNHQGGEGSMQALYNVFGDGSLHGTMQAKSFVGANSATEMTQSQGSGPTAGEAVTAPEKPKQRVRARRGQATDPHSIAERLRRVRIAERMKALQELVPNANKTDKASMLDEIIDYVKFLQLQVKVLSMSRLGGAAAVAPLVSEGGGDCIQTSANGGSHPRNSNGDQTPSANDRLTMTEHQVAKLMEEDMGSAMQYLQEKGLCLMPISLATAISSATSRSRNPMINHENPANGSHLLIQSSGGDGPSSPSMSVLTVQSATMGNGGLEGGAASVSKP

SEQ ID NO: 279 - protein, 210 aa, Glycine max
MKPDEASASGKRFRDDVVDNRAKHVFHGQPMPTTMPAAPHPPAIRPRVRAIRGQATDPHSIAERLRRERIAERIRALQELVPSVNKTDRAAMLDEIVDYVKFLRLQVKVLSMSRLGGAGAVAPLVTDIPLSSVEEEGGEGARNRPAWDKWSNDGTERQVAKLMEENVGAAMQFLQSKALCIMPISLASAIYQSQPPDTSSIVKPETNPPS

SEQ ID NO: 280 - protein, 335 aa, Glycine max
MLQHQLLRDSGLLNMPLSLPGNDVVVDASTFESPNPSGKASVQTLYNGFAGSLHGVGQSSNQTQHFQHPQGSSNPMQGQNFGAVPAGGGSATNQAPASGAAAGGAPAQPRQRVRARRGQATDPHSIAERLRRERIAERMKALQELVPNANKTDKASMLDEIIDYVKFLQLQVKVLSMSRLGGAAAVAPLVADMSSEGGGDCIQANGKSNGGGAQASTTNTNTNQTTATTTSNDSLTMTEHQVAKLMEEDMGSAMQYLQGKGLCLMPISLATAISTATCPTRNVNVNPLINAAAGATHFPTAANPAGEGPSSPSMSVLTVQSAIAGNDGAASVSKP

SEQ ID NO: 281 - protein, 331 aa, Glycine max
MAGNSGSEGLGDDFFEQILAVPEAGTVGMLQLGSTTGAFRGASGLMPLGLNLEQAAFLRHQVNVDDDVVHVNVDDATIHQHHLTLHNNNNSSSPSSTAPITDRDSMHMRGLFSAFGQLHTPIRPTLPLPPPPRQPQLHLHHHNQFQGQAAAAPASMAAMPQPPGIRPRVRARRGQATDPHSIAERLRRERIAERMKALQELVPSINKTDRAAMLDEIVDYVKFLRLQVKVLSMSRLGGAGAVAQLVADVPLSAVEGDQDIEGGANEQAWDKWSNDGTEQQVAKLMEEDVGAAMQFLQSKALCIMPISLASAIFRMPQSEASTGIKPESNSH

SEQ ID NO: 282 - protein, 244 aa, Glycine max
MMLQLNSGDAATHLASFHAPPYQLGLSLDQGEGPFLTPEDASGSGKRFRDDAVDTRPNNVFDGQPMPTTVPTAPHPPAVRPRVRARRGQATDPHSIAERLRRERIAERIRALQELVPSVNKTDRAAMLDEIVDYVKFLRLQVKVLSMSRLGGAGAVAPLVTDIPLSSVEEEGGEGRNQPAWEKWSNDGTERQVAKLMEENVGAAMQFLQSKALCIMPVSLASAIYQSQPSGTSSIVKPETNPPS

SEQ ID NO: 283 - protein, 303 aa, Gossypium raimondii
MANNPNESPADDFLEQILGLSHFAPTETGLAGPDGRLSGNATTAGAPMLLQLSSGGGTGHIGAIGGGGGGAFHGQVFPLGLSLEQGKGGFLKPEEASGSSKRFRNEVVDGRAFSVKNVFHGQPVPATVAAGPHPPAMRPRVRARRGQATDPHSIAERLRRERIAERIRALQELVPSVNKTDRAAMLDEIVDYVKFLRLQVKVLSMSRLGAAGAVAPLVTDLPLSSVEDESGEGGRSQPAWEKWSNDGTERQVAKLMEEDVGAAMQFLQSKALCVMPISLATAIYHTQSPDTSSVVKPETNPPS

SEQ ID NO: 284 - protein, 306 aa, Helianthus petiolaris
MSTDPPEGYGDDFLEQILAIPSYNITGCLPVNTADSTGSETVSVHHQQQQPQQQLQPQKFPLGLSLDNGRETIGGAFAGQQQQLQQQQQRERGGSMNMSGLFPQFENLQSHSLLHTVPQGFQGQPTSSTAVTVPHPPTIRPRVRARRGQATDPHSIAERLRRERIAERMRALQELVPSCNKTDKAAMLDEILDYVKFLRLQVKVLSMSRLGGAGAVAQLVSDVPLQSVEGDGSENGYNNQQQGQAAWENWSNDDTEREVAKLMEEDVGAAMQFLQSKALCIMPISLASLIYPNHQPDVKPEPSAPS

SEQ ID NO: 285 - protein, 481 aa, Horedeum vulgare
MNYSDGSFFPSWPGNSASENYSFVDGSVESYTEEGSMPTTGYFRARSNQNLTFDEHEQNPAMLANGCLPYNTQTDLLSGEILSDDKPSNSLVELSQLQNNVCLQNNLIPPGTLQCNSTPGTFDLQLDTPGLLELPHALSSSIESNGSEVSAFLADVQAVSSASTLCSTFQNVPSYMEPVSLEAFSFQGMQNAAMFNNASHSNGNLSVFDEATMASLHDSKEFLNGSISSLGTGQQSQLAGGGLKAEQQEQNTMCNIPLPSFVSASQMAVSEAQGALIPSKTTSITHNNKSEYPIPISHSADVQHKANSGNGNSASAKPRARARRGQATDPHSIAERLRREKISERMKNLQDLVPNSNKADKSSMLDEIIDYVKFLQLQVKVLSMSRLGAPGAVLPLLAESQTEGRSNSPLSSPTTSQGLLDVAGPEDSLVFEQEVIKLMETSITNAMQYLQNKGLCLMPIALASAISNQKGTSAAAIPPER

SEQ ID NO: 286 - protein, 290 aa, lactuca perennis
MATDPPEGYGDDFLEQILAIPSYNIAGCLPGNTTDANASETVSVHRQQQQQQPVFPLGLSLDNGRETIGAFAGQQQQRERGGSMNMTGLFPSFENLQSHSLLHSVPQAFQGQSTTSTAVTVPHPPSIRPRVRARRGQATDPHSIAERLRRERIAERMRALQELVPSCNKTDKAAMLDEILDYVKFLRLQVKVLSMSRLGGAGAVAQLVSDVPLQSVEGDTSENGYNQPAWENWSNDDTEREVAKLMEEDVGAAMQFLQSKALCIMPISLASLIYPPQTPDSNSHVKPETV

SEQ ID NO: 287 - protein, 296 aa, Nicotiana benthamiana
MATNQPEGYADDFLEQILAIPSYAGLPPVADVGTSSETTSFTSASAAGLQQPLFPLGLSLENGRDDVSDAGAYAVKHEREGINIGNLYAGLEHLQSHAVRHAVPPVHHIQSFQGQPTTSTTMTVPHSPAIRPRVRARRGQATDPHSIAERLRRERISERIKALQELVPSCNKTDRAAMLDEILDYVKFLRLQVKVLSMSRLGGASAVAQLVADIPLQSMEGDSAESKSNQHIWEKWSNVDTEQEVAKLMEEDVGAAMQYLQSKSLCIMPISLAALIYPTQQPDDMSMVKPEPAAPS

SEQ ID NO: 288 - protein, 443 aa, Nicotiana benthamiana
MQAMNQYDPTSSHDDFLDQILSSVPSSSLCWPDLSKSWDPHHHHLSPPLPPNPSSGDDHQLPPSNPLQHFQYDDQSSSFLAAKLRQHQITGGGGGGGDAVAAAKALLLQQQLLLSRTLAGNGLRSPTGASGDNGFLNMLGNGDQNDSVGNPANDSSVQALFNGFTGSLGQNSSQPQHFLHPQGGRMQAQSFGAPATAPAMNQTPAASGSAGGGTTPAAQPKQQRVRARRGQATDPHSIAERLRRERIAERMKALQELVPNANKTDKASMLDEIIDYVKFLQLQVKVLSMSRLGGAAAVAPLVADMSSEGRGEGNGGRGGNGTASSSNNDSMTVTEHQVAKLMEEDMGSAMQYLQGKGLCLMPISLATAISTATCHSRNPMIPNGNGGNNPLLGGGGGLATNGGGGEAGGPSSPKLSVLTVQSATIGNGGIDPSVKDATSVFEA

SEQ ID NO: 289 - protein, 387 aa, Nicotiana benthamiana
MQAMNSQMSLQEENGASSGQNMSHSHFDPTSSHDDFLQQILSSVPSSSPWPDLSSGGDGHFDDQSIFVASKLRQNQITGGGGGGAAAKALMLQQQLLLSRGLLAGNGDQNDDVGNPENEISVQALYNGFAGSLGQTSNQPQHFHHAQGGSMQAQSFGAPASSTMNQTPAASGGSAGGGQPKQQKVRARRGQATDPHSIAERLRRERIAERMKSLQELVPNANKTDKASMLDEIIDYVRFLQLQVKVLSMSRLGGAAAVAPLVADRSSEGGGGDCAQANGGGRGSNGTTSLANNDSMTMTEHQVAKLMEEDMGSAMQYLQGKGLCLMPISLATAISTATCHSMKLNNPLLHGGGSGGSAAINGGGGGPSSPSLSASTVQSATMGNGGA

SEQ ID NO: 290 - protein, 302 aa, Nicotiana benthamiana
MANNPSEGPDDFFDQILGFPAYNGAETNLAGSDAGAIPPAMLLQLNSGDASGQFSGMGLGVGLGGGGGFHHPSQSGSFPLGLSLEGGKSGFMKMDDVPAVPGRRFRDDVVDSRASSSVKPGFHGQPMPSMPHPPAIRPRVRARRGQATDPHSIAERLRRERIAERIRALQELVPNVNKTDRAIMLDEIVDYVKFLRLQVKVLSMSRLGGAAAVAPLVTEIPISSVEEEISEGGNNQPAWEKWSSDGTERQVAKLMEENVGSAMQFLQSKALCIMPISLASAIYHSQPPDTSSLIKPETNPPS

SEQ ID NO: 291 - protein, 298 aa, Nicotiana tabacum
MATNQPGGYADDFLEQILAIPSYAGLPPVADVGTSSETTSFTSSSVAAAGLQQPLFPLGLSLDNGRDDVSDAGAYAVKHEREGINIGNLYAGLEHLQSHAVRHAVPPVHHIQPFQGQPTTSTTVTVPHPPAIRPRVRARRGQATDPHSIAERLRRERISERIKALQELVPSCNKTDRAAMLDEILDYVKFLRLQVKVLSMSRLGGASAVAQLVADIPLQSVEGDSAESRSNQHIWEKWSNVDTEQEVAKLMEEDVGAAMQYLQSKSLCIMPISLAALIYPTQQPDDPSMVKPEPAAPS

SEQ ID NO: 292 - protein, 524 aa, Oryza sativa
MGGFAYPFTPSPAWSRDAVFAGSPWAAGGVSSLADALVSYGAVDDEEAAFLGKTAASSPSTARLHEQQQLLLEAELLRHGDGLGFAAMDDDGGAAMLGALEPCAMPLTDSGGPPVICSSSSNDSSGSEHSAAMPAGGGFLVGEQQQHVPPAAYAAGGVLPSMAAGEETPQSFGFGSLFNGDLLQEATVSKYHHHQQQQQLGVVPSSQPHHLNDDIDFNTGKLMSFASGQQHVTPSIDSLQIDQKEFSSGLHHLNLSSLISGPLASFNATQSHRQPAEACGGKNGGAAPFVNLSEVLPKGNGSGSAGNGAPKPRVRARRGQATDPHSIAERLRREKISDRMKDLQELVPNSNKTNKASMLDEIIDYVKFLQLQVKVLSMSRLGAAEAVVPLLTETQTESPGFLLSPRSSSGERQAGAGAVTGGLPGDQPELLDGGAMFEQEVVKLMEDNMTTAMQYLQSKGLCLMPVALASAISAQKGTSSAAVRPEKKKNGDGDGGGDEEDVKGEFDAPRRPPVGRPKEMRSRV

SEQ ID NO: 293 - protein, 441 aa, Oryza sativa
MQPNARQMRGGGGGGGGGQDDFFDQMLSTLPAVWSELGSGKPAWDLTAGAVGGGGGASDDHSAAAFDDSALLASRLRQHQIDGGGDKPIMLQLSDLHRHHGLAAGDDSGGAAGFLPLSLFADRSQDDIDAAFKSPNGARGDHALYNGFGAAGMHGAAAMQPPPFGQGGSMPAQSFGGGAAASGGGGGGSASAAAAAGASSGGGAAAPPRQRQRARRGQATDPHSIAERLRRERIAERMKALQELVPNANKTDKASMLDEIIDYVKFLQLQVKVLSMSRLGGASAVAPLVANMSSESNGNGNATSSSGNGEAANGSSNGDNNGGGTLRVTEQQVAKLMEEDMGSAMQYLQGKGLCLMPISLATAISSATSSSLLPRTGGGAGGSLHEGGNGTSPPLVNGTATGCDDAGVFFSVKFVVELSFLLLNEDCRGKEESKLLVQKGP

SEQ ID NO: 294 - protein, 294 aa, Oryza sativa
MAGQQPQQQGPPEDDFFDQFFSLTSSFPGAAPGGRAAGDQPFSLALSLDAAAAAEASGSGKRLGVGDDAEGGGSKADRETVQLTGLFPPVFGGGGVQPPNLRPTPPTQVFHPQQSKQGGAAVGPQPPAPRPKVRARRGQATDPHSIAERLRRERIAERMRALQELVPNTNKTDRAAMLDEILDYVKFLRLQVKVLSMSRLGGAGAVAQLVADIPLSVKGEASDSGGNQQIWEKWSTDGTERQVAKLMEEDIGAAMQFLQSKALCMMPISLAMAIYDTQQTQDGQPVKHEPNTPS

SEQ ID NO: 295 - protein, 367 aa, Oryza sativa
MQPSSRDTVAGGGGEGTQDDFFDQMLSTLPSAWADLGGGGGGAAGKSPWEVDPAAAAAASQVFDESALLASRLRHHQIGGAGGGGGEKPVMLQLSELHRQAGGGEEDGSGAFSPLPLFTDRTNVPPREEMEGGFKSPNAAAGGEHALFNGFGVHGGSGGAGQPPFGQLRRERIAERMKSLQELVPNANKTDKASMLDEIIDYVKFLQLQVKVLSMSRLGGAAGMAPLVASMSSEGNSNGSSNGGGGKASKGGTGGEGGGGGGGGGGGGTGGGMRVTEQQVAKMMEEDMGTAMQYLQGKGLCLMPISLASAISSATSSASLLSRPSIRHAGAPPQTMLDAAGPTSPAAMSNGDDPRHAKADGGAGGTQ

SEQ ID NO: 296 - protein, 478 aa, Oryza sativa
MDYSAGSYMWPGNSGSENYNFVDGSSESYAEEGSLPPSGYFMGAGSDRSLKITENERNPTMLANGCLPYNTQAHPLSGQILPKGELPNNLLDLQQLQNSSNLRSNSIPPGVLQCNSTSGTFDAKLDTPGLAELPHALSSSIDSNGSDISAFLADVHAVSSAPTLCSAFQNVSSFMEPVNLDAFGFQGAQNVAMLNKTSLPNGNPSLFDNAAIASLHDSKEFLNGGSIPSFGTVLQALGAGGLKAAQQEQNIRNIPLPTFTSGSHLAVTDAQGPPLPSKIPPLIHDHNSEYPINHSSDVEPQANSAPGNSANAKPRTRARRGQATDPHSIAERLRREKISERMKNLQVLVPNSNKADKASMLDEIIDYVKFLQLQVKVLSMSRLGAPGAVLPLLRESQTECHSNPSLSASTISQGPPDMPDSEDSSAFEQEVVKLMETSIISAMQYLQNKGLCLMPIALASAISNQKGMAAAAAIPPEK

SEQ ID NO: 297 - protein, 499 aa, Oryza sativa
MAAAAAAGQISLDDLRNGGGVAANAGGGGGVHDDFLDQMLSSLPPSAWPDLAAGKAAEDDAEGMHHHHHQQQQQFGGPYDESAMLASRLRQHQISGGGGGGGGGAAAVKQMVLQQLADLRQGHHMMLQGLGGRSPAGGGGGGGDGGLLLPLTLGSGGSGGDVQALLKAAAANSAGGGDAGGVYGGGFAGSLHQQQQHFQPHPQTAPTIPTQSFGGGGGGGGGGTASGGGAAQPQAGAAGGGAPAPPRQRVRARRGQATDPHSIAERLRRERIAERMKALQELVPNANKLMQTDKASMLDEIIDYVKFLQLQVKASTYTKLLIHVLSMSRLGGAAAVAPLVADMSSEGRGGGAANGGAPAAAGSDSLTVTEQQVAKLMEEDMGTAMQYLQGKGLCLMPISLASAISSATCHLRPPVVAAAQQFPAGLGAAAAAAHHHQLSAAAAAAAMRGHLPGLNADGSVPASPSMSVLTAQSAMANGGGGAADGEGSQLKDAASVSKP

SEQ ID NO: 298 - protein, 293 aa, Oryza sativa
MAGQQPPTGGAEDDFFDHFFSIPSAAAAGAGGVGGFGSGDHHPFPLALSLDAEGAGAARRLLDGGHDGGRTDRDPVQLAGLFAPVFGAAAGVQPPHLRAPPPPQVFHAQPKPGEGAMAAPQPQQPPAPRPKVRARRGQATDPHSIAERLRRERIAERMRALQDLVPNTNKTDRAAMLDEILDYVKFLRLQVKVLSMSRLGGAGAVAQLVADIPISVKGEASDSGSKQQIWEKWSTDGTEKQVAKLMEEDIGAAMQFLQSKALCMMPISLAMAIYDTQHSQDGHSVKPEPNTPS

SEQ ID NO: 299 - protein, 274 aa, Picea abies
  misc_feature (257)..(259): Xaa can be any naturally occurring amino acid
MLPLPLSLGQAGKSGDMNEPGSREEIEASFKSVNNARDSNLGGLFQPFAVSPRGVRPTGQNFHAQPGQVPLQGYGGMPQPQHQNPPPTGVGAAPPVRPRVRARRGQATDPHSIAERLRRERIAERMKALQELVPNSNKTDKASMLDEIIDYVKFLQLQVKVLSMSRLGGAGAVAPLVADIPAEGANAPQGTRTNGSQNSSPDGLALTERQVAKLMEEDMGTAMQYLQGKGLCLMPISLASAINNSGSRPQAPSTPSXXXLLASNVNDRQVLEPS

SEQ ID NO: 300 - protein, 300 aa, Populus deltoides
MANNPTEPPADDFLQEILGMPNFASAEAGLVGADAGLAGAAAAQASMMLQLSSGDGSGHISDLGGAPGGGSAGFHGFPLGLSLEQGKGGFLKPEEASGSGKRFRDEIVDGRAKNVFHGQPMPTTVAIAPHPPAMRPRVRARRGQATDPHSIAERLRRERIAERIRALQELVPSVNKTDRATMLDEIVDYVKFLRLQVKVLSMSRLGGAGAVAPLVTDIPLSSVEDETGEGGRNQPAWEKWSNDGTERQVAKLMEENVGAAMQFLQSKALCIMPISLATAIYHTQPPDTTSIVKPETNPQS

SEQ ID NO: 301 - protein, 463 aa, Pinus radiata
MSLLPPGIGGQGLNSQENDPYPYDDSQFLANRLRQHQLSGNSSMNQTPNQASQGINETNTSPGRSMVLQLSTGSASASQLLASMGNSPRGTAVMTQSPSTGGSCNGSDGGMLPLPLSLGQAGKSGDINESRSRDEIEASFKSANHARDSNLGGLFPPFAASPRGVRPTGQNFHTQSGQVPMQVYGGMPQPQHQNPSPTGVGAAPPVRPRVRARRGQATDPHSIAERLRRERIAERMKALQELVPNSNKTDKASMLDEIIDYVKFLQLQVKVLSMSRLGGAGAVAPLVADIPAEGANAPQGTRTNSSQNSSPDGLALTERQVAKLMEEDMGSAMQYLQGKGLCLMPISLASAINNSGARPQAPSTPSLQGLLPPNANDRQILEPSNSALSALTSTSMTIQSSISSPGSGITEQGDNAHKAVNGTRNPKDSREANSVTKSNGIGGPALSKNAVKGEDEPQRRTGQ

SEQ ID NO: 302 - protein, 325 aa, Picea sitchensis
MDDIFDQLLSSSWEDINGADRSSLDSSAGGPTNCLPGDSMGTLQASSRVSTMSVTPSSHMSPNLEGQAQNNDVQNSSSSVIAGENTPYLLKELLVCSQATDPHSIAERERRERIAKNLKSLQELVPNANKTDKASMLDEIIDYVKFLQLQVKVLSMSRLGGAGAVAPLIADVPAEGSGSLASAALGQAGGSLSQDGLAFEQNVVKLMEKDMTAAMQYLQNKGLCLMPIALATAISSSTGKPLLGSGVTNSVDSTSDRQSSGNQPASLTVDSCSGALGMGSAGFGSDFLLKENTVEKRGRELVPTAESNGAEFGIISSLPKLRKKE

SEQ ID NO: 303 - protein, 333 aa, Populus taeda
MLARENRSGDTEHDDLQGTLLTSYTGPQGGQTVLPRTPGAQSHQQNLSTQTIQSGEGTSLQQYGNHSAVSQLQSGAGGGNAANGAARPRVRARRGQATDPHSIAERLRRERIAERMKSLQELVPNSNKTDKASMLDEIIEYVKFLQLQVKVLSMSRLGGAGAVAPLIADVPSQGSGGVMSTALGQASGPLTLSQDGLAFEQEVARLMESNMTSAMQYLQNKGLCLMSIALATAISSSSGKPVLATVPGTGVDSSEKQNSDMQSIVLPFSSSSTTMGLRATASGSDAPINENSINKASIEKVVAEKSNGISPGLSSDVPKVGSQSREELLKRAQ

SEQ ID NO: 304 - protein, 300 aa, Populus trichocarpa
MANNPTEPPTDDFLQEILGMPNFASAEAGLVGADAGLAGTASVQAPMMLQLSSGDGSGHISALGGAPGGGGAGFHGFPLGLSLEQGKGGFLKPEEASGSGNRFRDDIVDGRVRNVFHGQPMPTTVTAATHPPAMRPRVRARRGQATDPHSIAERLRRERIAERIRALQELVPSVNKTDRAAMLDEIVDYVKFLRLQVKILSMSRLGGAGAVAPLVTDIPLSPVEDETGEGGRNQLAWEKWSNDGTERQVAKLMEENVGAAMQFLQSKALCIMPITLATAIYHTQPPDTTTIVKPETNPPS

SEQ ID NO: 305 - protein, 331 aa, Populus trichocarpa
MAGNPPPEGLGDDFFEQILAGQPPGYGGEAVGSTSLPMMGLQLGSSAANVGLMRSSANNNMGMMPLGLNLEHHGFLRQQQDDGSSSLDTNNSNNINNASPFSITSAGFLGRDSVHMTSLFPTFGQLQIHSSIRSAPPPLGPPQIHQFNSQPTSGAVSAVPQPPGIRPRVRARRGQATDPHSIAERLRRVRITERVKALQELVPTCNKTDRAAMLDEIVDYVKFLRLQVKVLSMSRLGAAGAVAQLVADVPLSSVQGEGIEGGANQQAWENWSNDGTEQEVAKLMEEDVGAAMQLLQSKALCIMPVSLASAIFRARPPNAPTLVKPESNPPS

SEQ ID NO: 306 - protein, 334 aa, Populus trichocarpa
MAGNPPPEGLGDDFLEQILAAQPPGYGGGGEVMGSTSLPMMGLQLGSCAGNVGLLRSNANNNMGMMPLGLNLEHHGFLRQQQDDSGSSLDTNNSNNINNTPPSIKSARILGRDSVHMTSLFPTFGHLQIHSSIRPTPPPPGPPQIHQINSHPNPGAVSAVPQPPGIRPRVRARRGQATDPHSIAERLRRVRITERVKALQELVPTCNKTDRAAMLDEIVDYVKFLRLQIKVLSMSRLGAAGAVAQLVADVPLSSVQIKGEGNEGGANQQSWENWSNDDTEQEVAKLMEEDVGAAMQFLQSKALCIMPISLASAIFRARPPNASTLINTESNTPS

SEQ ID NO: 307 - protein, 456 aa, Populus trichocarpa
MISSNQSVESLATQDTSSVVLGSESDYAVDKVLISEQARLQNDCQNCNGNPSPDGMARGNLKFGNTGLQCNGILPTLSSLNYPNQLPIVGDLTSYLSFSEASNAGCNGREQSEYLRSLKNLQNLSSIPQLWPSQSYEGVSSLPPLMGQDRIEGSGLRGGNLDDDMHIMGKGYMGMDEILRLDKLSASPTTEGKEDLQSCPFSSGIAEPNVNMSMNQLSSMPQTTSAAPVEGCNGTGKTRVRARRGHATDPHSIAERLRREKIAERMKNLQELVPNSNKVDKASMLDEIIEYVKFLQLQVKVLSMSRLGAAGAVIPLLTDGQPEGHNSLSLSPSAGLGIDISPSADQIAFEQEVLKLLESDVTMAMQYLQSKGLCLMPIALAAAISSVKASLSGTTSEERKNNGYTSGLVSSSSSITGIDTHPMSNDNNIATGTLSSKGMIVNGCNEVVKQEVLKNT

SEQ ID NO: 308 - protein, 300 aa, Populus trichocarpa
MANNPTEPPTDDFLQEILGMPNFASAEAGLVGADAGLAGAAAAQASMMLQLSSGDGSGHISDLGGAPGGGSAGFHGFPLGLSLEQGKGGFLKPEEASGSGKRFRDEIVDGRAKNVFHGQPMPTTVAIAPHPPAMRPRVRARRGQATDPHSIAERLRRERIAERIRALQELVPSVTKTDRATMLDEIVDYVKFLRLQVKVLSMSRLGGAGAVAPLVTDIPLSSVEDETGEGGRNQPAWEKWSNDGTERQVAKLMEENVGAAMQFLQSKALCIMPISLATAIYHTQPPDTTTIVKPETNPPS

SEQ ID NO: 309 - protein, 468 aa, Poncirus trifoliata
MQPCSSGGEMQGISSLLSNGSHEQQSQIHQSATFDPTSQDDFLEQMLSSLPSCSWTDLKSPWGVVDLNPNNNNNNINNKQPRDLSDETAPSTTQENNVPAGFQFDESMILASKMRQHQISGNTGSGNNNSAAAKFMMQQQQQQQIMMAAARGGIGLPLSLGNGGDNDIVDASSFKSQQGGDGSVQALYNGFTGSLHGSTQPQHFHHLQGGSMPGQTFGAPGPVMNQTQAQASGSTGGGGNTPAQQPKQRVRARRGQATDPHSIAERLRRERIAERMKALQELVPNANKTDKASMLDEIIDYVKFLQLQVKVLSMSRLGGAAAVAPLVADMSSEGAGGGDCIQANGRNPNGAQTTSANDSLTVTEHQVAKLMEEDMGSAMQYLQGKGLCLMPISLATAISSATCHSRNPIISTSNNNNNNGNPHHNPLFQSNGEGPTSPSMSVLTVQSATMGNGGADGSVKDAASVSKP

SEQ ID NO: 310 - protein, 326 aa, Ricinus communis
MAGNPPPEGLGDDFFEQILAVQPGYGGGDGGGGGDVVGSTMPMMGLQLGSASSGGGGLRTNNMGMMPLGLNLEFLRQQEDGSGALDNNNHTNNNNNNVSSSTTSVINDRDSVHMASLFPTFGQLQTQTLRPPPPPHLHQPFHGQPTPGVVSAASQPPAIRPRVRARRGQATDPHSIAERLRRERIAERMKALQELVPTANKTDRAAMIDEIVDYVKFLRLQVKVLSMSRLGAAGAVAQLVADVPLASVEGESIDGAAANQQTWEKWSNDGTEQQVAKLMEEDIGAAMQFLQSKALCIMPISLASAILRTHPPDAPSIIKPESNTPS

SEQ ID NO: 311 - protein, 299 aa, Ricinus communis
MANNPTEPPADDFLQEILGLPNFASADAAGLVGADGALATPMMLQLSSGDGSNHITALGGGGGGGGGAGFHGFPLGLSLEQGKGGFLKPEEASGSGKRFRDDVVDGRANTVKNVFHGQPMPTTMAAAPHPPTMRPRVRARRGQATDPHSIAERLRRERIAERIRALQELVPSVNKTDRAAMLDEIVDYVKFLRLQVKVLSMSRLGGAGAVAPLVTDIPLSSVEDETGEGGRNQPAWEKWSNDGTERQVAKLMEENVGAAMQFLQSKALCIMPISLATAIYHTQAPDTSTIVKPETNPPS

SEQ ID NO: 312 - protein, 277 aa, Sorghum bicolor
MAGQPPPPGGSEDDFLEHFFAFPSAASAAAGGHAGAGAGGDHPFPLALSLDAAAEPKPDRDPVQLAGLFPPVFAGAGGVQQPHLRGPPPPQMFQAQPKPGEGGMAPQPPAPRPKVRARRGQATDPHSIAERLRRERIAERMRALQELVPNTNKTDRAAMLDEILDYVKFLRLQVKVLSMSRLGGAGAVAQLVADIPLSVKGEASDSGSTQHIWEKWSTDGTEKQVAKLMEEDIGAAMQFLQSKALCMMPISLAMAIYDTQHSQDGHSLMKPEPNTSS

SEQ ID NO: 313 - protein, 302 aa, Solanum lycopersicum
MANNPSEGPSDDFFDQILGFPAYNGAEPNLAGNDAGAIPPAMMLQLNSGDGSSQFTGVGLGVGLGGGGFHGHGGGGSFPLGLSLEQGKGGFLKMDDVSAPGRRFRDDVVDSRASSSVKPGFHGQPMPSMPHPPAIRPRVRARRGQATDPHSIAERLRRERIAERIRALQELVPSVNKTDRAVMLDEIVDYIKFLRLQVKVLSMSRLGGAGAVAPLVTDIPISSVEEESSEGGNNNQPAWEKWSSDGTERQVAKLMEENVGAAMQFLQSKALCIMPISLASAIYHSQPPDTSSLVKPETNPPS

SEQ ID NO: 314 - protein, 296 aa, Solanum lycopersicum
MADNPPEVYAADDFLEQILAIPSYASLPVTDLTAGASSENSTSGVSQLQQQPLFPLGLSLDNGFADANNTGGFQVKTEREAMNMGNLYPGLEHLQSHAVCLSVPQVHQVQPFQGHPTSSAIVTIPHQPAIRPRVRAQRGQATDPHSIAERLRRERISERIKALQELVPSCNKTDRAAMLDEILDYVKFLRLQVKVLSMSRLGGTSAAAQVVADIPLQSVEGDTCESHSNQHVWEKWSDSETEQEVAKLMEEDVGTAMQYLQSKSLCIMPISLAALIYPTQQSDNQSMVKPEQAAPL

SEQ ID NO: 315 - protein, 304 aa, Solanum lycopersicum
MAANQPEGYADDFLEQILAIPPYSGLPVADVGTPSETTSFTSASAVSHLNSAAAAGLQQPLFPLGLSLDNGRDDVGDAGPYAVKHERDGMNIGNLYAGLEHLQSHAVRHSVPSVHHVQPFQGPPTTSTTVTVPHPPSIRPRVRARRGQATDPHSIAERLRRERISERIKALQELVPSCNKTDRAAMLDEILDYVKFLRLQVKVLSMSRLGGASAVAQLVADIPLNLWEGDSGESRSNQHIWDKWSNVDTEREVAKLMEEDVGAAMQYLQSKSLCIMPISLAALIYPTQQPDDQSLVKPEAAAPS

SEQ ID NO: 316 - protein, 302 aa, Solanum tuberosum
MANNPSEGPSDDFFDQIMGFPAYNGAETNLAGNDAGAIPPAMMLQLNSGDGSGQFTGVGLGVGLGGGGFHGHGGGASFPLGLSLEQGKGGFLKMDDVSAPGRRFRDDVVDSRASSSVKPGFHGQPMPSMPHPPAIRPRVRARRGQATDPHSIAERLRRERIAERIRALQELVPSVNKTDRAVMLDEIVDYVKFLRLQVKVLSMSRLGGAGAVAPLVTDIPISSVEEESSEGGNNNQPAWEKWSSDGTERQVAKLMEENVGAAMQFLQSKALCIMPISLASAIYHSQPPDTSSLVKPETNPPS

SEQ ID NO: 317 - protein, 304 aa, Solanum tuberosum
MAANQPEAYADDFLEQILAIPSYSGLPVADVGTPSETTSFTSASAVSHLNSAAAAGLQQPLFPLGLSLDNGRDDVSEAGAYAVKHERDGMNIGNLYAGLEHLQSHAVRHSVPSIHHVQPFQGPPTTSTTVTVPHPPSIRPRVRARRGQATDPHSIAERLRRERISERIKALQELVPSCNKTDRAAMLDEILDYVKFLRLQVKVLSMSRLGGASAVAQLVADIPLQSVEGDSGESRSNQHIWDKWSNVDTEQEVAKLMEEDVGAAMQYLQSKSLCIMPISLAALIYPTQQPDDQSLVKPEAAAPS

SEQ ID NO: 318 - protein, 447 aa, Solanum tuberosum
MQAMNSLLSQQQQSQMSLQDLQNGGNGGSTGGVGGLGQHNMGHFHFDPTSSHDDFLEQILSSVPSSSPWPDLSKSWDPHHHLSSPPHNPSSGEDQPPSNPLHSQFHYDDQASSLLASKLRQHQITGGGAAAAAKALMLQQQLLLSRTLAGNGLRSPNGASGDNGLLSLPLNLSNNGDQNDGVANPANDNSVQALFNGFTGSLGQTSNQPQHFHHPQGGSMQSQSFGAPAMNQTPAASGSAGGGGGSTPAAQPKQQRVRARRGQATDPHSIAERLRRERIAERMKALQELVPNANKTDKASMLDEIIDYVKFLQLQVKVLSMSRLGGAAAVAPLVADMSSEGRGEGNVGRGGNGTAASSSNKETMTVTEHQVAKLMEEDMGSAMQYLQGKGLCLMPISLATAISTSTRIPLLSPEAGRPASPTLSALTVQSATIGNAAGKDATSLFEA

SEQ ID NO: 319 - protein, 382 aa, Solanum tuberosum
MQAMNSFQSTGENGASSGEHISHSHFDPSSSHDDFLQQILSSVPSSSPWPEISGDGHPYNFDDHQSTLLASKLRQHQINGGSSAAAAAKALMLQQQLLLSRGIAGNGGDQNDDGLNPGNDISVQALYNGFAGSLGQTSNQSQHFHHSQAQSFGAPAASLTMNQTPAASGSAGGAQPKQQKVRARRGQATDPHSIAERLRRERIAERMKSLQELVPNANKTDKASMLDEIIDYVRFLQLQVKVLSMSRLGGAAAVAPLVADRSSEGGGDCVQGNGGRGGSNGTTSSANNDSSMTMTEHQVAKLMEEDMGSAMQYLQGKGLSLMPISLATAISTSTCHSMKPNNPLLLGGGSAINGGGETGGGPSSPTLSASTVQSATMGNGGT

SEQ ID NO: 320 - protein, 290 aa, Triticum aestivum
MLLCSTIQVIQMGNLSVFDEATMASLHDSKEFLSGSISSFGTAEQSQLAGSGLKAEQQEQNAMCNIPLPFASGSQMAVSEAQGAMIPSKISSTIHNNKSEYPVPISHSADAQNKANSANGNSASAKPRARARRGQATDPHSIAERLRREKISERMKNLQDLVPNSNKADKSSMLDEIIDYVKFLQLQVKVLSMSRLGAPGAVLPLLAESQTEGRSNSPLSSPTASQGLLDAAGPEDSLVFEQEVIKLMETSITNAMQYLQNKGLCLMPIALASAISNQKGTSAAAIPPER

SEQ ID NO: 321 - protein, 485 aa, Vitis vinifera
MDEYLDHLFSSTSWSDVNVKEGSSWICGEPSQTNGMLSDSIGIYEGDKKNSPVGMTNSNLMIEGLVTQDTSSIVLGGESDHGLGKGLLLEEAPRQQDLQNTEGNSSLNGAVNGSSEVGYVGLQLNTPTSTPCSLDLGSPKQLSLIGGMSRSSRPFTELDHVGCNGNEPSDFQRSVGNFQALPPIPQLWSQPSYGGGSSLSPVMGEYKMQGFGLQGEYVDNEMDIMRNRYVGDEILQLDNISSAIPIKGKEEQHTHPFSPSAVGPHMTMTASGLQSLPQTTVGTASGGCNGTGKPRVRARRGQATDPHSIAERLRREKIAERMKNLQELVPNSNKTDKASMLDEIIEYVKFLQLQVKVLSMSRLGAAEAVVPLITDGQAEGSKGLSLSPSAGQAEDICQSPDQIAFEQEVVKLMESNVTMAMQYLQSKGLCLMPIALATAISSGKAASSGTGSDEGKNAATPVAATPVATAYLALGHIIHLLMAMF

SEQ ID NO: 322 - protein, 418 aa, Vitis vinifera
MLSTLPSWSDLPANPKSPWELNASNPISMPSNKSRDLSDDTTPSNPDNVQFAFDESAMLASKLRQHQISGNSSAAKSALMLQQQLLLSRGVAMGRSPSNGSGAGESGLLQLPLSLSNGDSCLVDRSQNDVVDGSSSFKSPNQGGDGSVQALYNGFAGALHGSGQASNQAQNFHHPQGGSMQAQNYGAPATRVRARRGQATDPHSIAERLRRERIAERMKALQELVPNANKTDKASMLDEIIDYVKFLQLQVKVLSMSRLGGAAAVAPLVADMSSEGGGDCIQASGTSGPTGGRATNGTQTTTSNDSLTVTEHQVAKLMEEDMGSAMQYLQGKGLCLMPISLATAISTTTCHSRNPMVAAAAVAASNINNGSHTHPLLPNSNADGPSSPSMSVLTVQSATMGNGLADAPVKDAASVSKP

SEQ ID NO: 323 - protein, 289 aa, Vitis vinifera
MASNPSEAPADDFLEQILGIPTYPAADPNLAANDVNLAAPMVLQLGSGEGSGHIAGGYQGTMFPLGLRLEQGKSSFLKPEDASGSGKRFREEVIDGRASTVKNAFHGQPMQATVAAAPHPPAIRPRVRARRGQATDPHSIAERLRRERIAERIRALQELVPSVNKTDRAAMLDEIVDYVKFLRLQVKVLSMSRLGGAGAVAPLVTDIPLASVEEEASEGGRNEPAWEKWSNDGTERQVAKLMEENVGAAMQFLQSKALCIMPISLASAIYHSQQPDTTPLIKPQTNPPS

SEQ ID NO: 324 - protein, 313 aa, Vitis vinifera
MATNPPEGYADDFLEQILAIPSYPGHDPNMVGTGSTMVLQLSSGDGSGHVAGGGFQGPVFPLGLSLESGIPATQVAPGSGERFRDDVDARGSSGRSERESVHLDGLFPAYGHVQSLSVRPAVPQVHQAFHGQPTPVPITAAPHPPAIRPKVRARRGQATDPHSIAERLRRERIAERMKALQELVPSSNKTDRAAMLDEIVDYVKFLRLQVKVLSMSRLGGAGAVAQLVADIPLPAVEGETGEGGSNQQAWDKWSNDGTEREVAKLMEEDVGAAMQFLQSKALCIMPISLAAAIYPAHQTDTPTLIKPEPNAPS

SEQ ID NO: 325 - protein, 285 aa, Zea mays
MAGQPPPQGPEDDFFDQFFSMTAGGSYPGATAGGGRAPGDQPFSLALSLDAAAAEASGSGKHADGGKADREAIQLPGLFPPAFGGGVQPPHLRATPPTQVFHAQQPKQGGAAVGPQPPAPRPKVRARRGQATDPHSIAERLRRERIAERMRALQELVPNTNKTDRAAMLDEILDYVKFLRLQVKVLSMSRLGGAGAVAQLVADIPLSVKGEASDSGSKQQIWEKWSTDGTERQVAKLMEEDIGAAMQFLQSKALCMMPISLAMAIYDTQHSQDGQPVKPEPNTPS

SEQ ID NO: 326 - protein, 285 aa, Zea mays
MAGQPPPSGASEDDFLEHFFAFPSAASAGAAGGHAGAGVGGDHPFPLALSLDAAAEAKPDRDPVQLAGLFPPVFAGAGGVHQPHLRGPPPPQMFQAQPKPGEGGMAPQPPAPRPKVRARRGQATDPHSIAERLRRERIAERMRALQELVPNTNKTDRAAMLDEILDYVKFLRLQVKVLSMSRLGGAGAVAQLVADIPLSVKGEAGDGGGAPQQQQQQHVWEKWSTDGTEKQVAKLMEEDIGAAMQFLQSKALCMMPVSLAMAIYDTQHPLDGHGHSLKPEPNASS

SEQ ID NO: 327 - DNA, 922 bp, Allium cepa
cacttcacttcccctttcttcatttcttcaatacctacaaaccctagcttcactttactatttaaaaatggcgtctaataacaacccgcaacctccttccgatggactcaacgacgacttcttcgaccaaattttttccatgccttccgccttcgccgcctcctcagcctctactgacgccaccgaagctctcaactatgctgattcctccaccactggggttaccccgatgttctcacttggcctcagcttggatcagcagcctaagtctgattcgtcccaatcggaaagagagcatccggttcagtttgcttgcttgtttccacagtatgggcacaataatcaagttcatcaaacccggcctaatctttctcctcctcaagttcttcatggacaagcaatgcagagcagtatggctgcaacaccacaacctacaggtccacggccaagggttagggctaggagaggccaagctaccgatcctcatagtatagctgagcgattgaggagggaaagaatagcagaaaggattagagctttgcaggaattggtgcccagcactaataagaccgatagagctgtgatgctggatgaaattgtagagtatgtgaaattcttgaggcttcaagtaaaggtactaagcatgagtagactaggtggtgctggtgctgttgcacagctggtagccgatatccctatgtcttcttcagttgagggtgattcaagtgaaagtgggaagacaagctaccaagggtgggaaaaatggtcaaccgacggcaccgagcgtcaggtggcaaaactaatggaagaagatgtaggggctgcaatgcaatttctccaatcaaaagccctctgcatcatgcccatatctttagcagctgcaatttgtcaaacgaatccctcaaccgaaatctctttcatg

SEQ ID NO: 328 - DNA, 1456 bp, Arabidopsis thaliana
gtctgtgtctcttcgtcctcattagcttaagcatcatcattctctcacctaacaactccacacaagattcttcgcatggaaagttgttcttcgacttctcttctctaactcgctatcttttaactcacccagctccactgagtcgaaaatttcaaacctttactcgtttccttcatggctaataacaacaacatcccacatgatagcatctccgatccatctcctaccgacgatttcttcgagcagatcctcgggctttccaacttctccggttcttcaggttctggtctctctggaatcggcggcgtgggtccacctccgatgatgcttcagcttggttcaggcaacgaagggaatcataatcatatgggtgccattggaggaggtggacctgtagggtttcataatcagatgtttccgttgggattaagtctcgatcaagggaaaggacatggctttcttaaacctgatgaaactggtaaacgtttccaagacgatgttcttgataatcgatgttcctctatgaaacctattttccatgggcagccaatgtcacagccagctccaccaatgccgcatcaacagtctactattcggcctagagttagggctaggcgaggtcaagctaccgatccacatagcatcgctgagaggctccgaagggaaagaatagcagaacggatcaggtcgttgcaggaacttgtacctaccgttaacaagacagatagggctgctatgatcgacgagattgtcgattatgtaaagtttctcaggctccaagttaaggtcctgagcatgagccgtcttggtggagccggtgctgtcgcaccactagtcactgaaatgccattatcttcatcagttgaggatgagacgcaggccgtgtgggagaaatggtcaaacgatgggacagagaggcaagtggctaagctgatggaagaaaacgttggagcagcgatgcaacttttgcaatcaaaggctctttgcataatgccgatctcattggcaatggcgatttaccattctcagccaccagacacatcttcttcaatcgtcaaaccagagatgaatcctccaccgtagatttttgttcatccaacggtccccagctgatgattgacattttgctctgtttcccactactagacttttgtgactcatgaaaggtaagtaaaaaggcattggagatggaatctaagtaggatttgtgcagtaaagaagtaaaacgggatctgtcaaaagaaggaaaaagctctcgcttgcttggctagtatttatcattttgatgaaagtaactcttttttgttcaaagactttagtgtgattttcaggaccaagggctttgagggtagtgctagctgtagtaatagtaatgaaggtgtgggatcgtgtttctgaattatgtaaaaaaggaagaaaaaacaaatgttggtattatattatggttttgcctctc

SEQ ID NO: 329 - DNA, 1588 bp, Arabidopsis thaliana
gctcctttctcgtctctgtcttcttcgtcctcattcgttttaaagcatcaaaatttcatcaacccaaaatagattaaaaaaatctgtagctttcgcatgtaaatctctctttgaaggttcctaactcgttaatcgtaactcacagtgactcgttcgagtcaaagtctctgtctttagctcaaaccatggctagtaacaaccctcacgacaacctttctgaccaaactccttctgatgatttcttcgagcaaatcctcggccttcctaacttctcagcctcttctgccgccggtttatctggagttgacggaggattaggtggtggagcaccgcctatgatgctgcagttgggttccggagaagaaggaagtcacatgggtggcttaggaggaagtggaccaactgggtttcacaatcagatgtttcctttggggttaagtcttgatcaagggaaaggacctgggtttcttagacctgaaggaggacatggaagtgggaaaagattctcagatgatgttgttgataatcgatgttcttctatgaaacctgttttccacgggcagcctatgcaacagccacctccatcggccccacatcagcctacttcaatccgtcccagggttcgagctaggcgtggtcaggctactgatccacatagcatcgctgagcggctacgtagagaaagaatagcagaacggatcagggcgctgcaggaacttgtacctactgtgaacaagaccgatagagctgctatgatcgatgagattgtcgattatgtaaagtttctcaggctccaagtcaaggttttgagcatgagccgacttggtggagccggtgcggttgctccacttgttactgatatgcctctttcatcatcagttgaggatgaaacgggtgagggtggaaggactccgcaaccagcgtgggagaaatggtctaacgatgggactgaacgtcaagtggctaaactgatggaagagaacgttggagccgcgatgcagcttcttcaatcaaaggctctttgtatgatgccaatctcattggcaatggcaatttaccattctcaacctccggatacatcttcagtggtcaagcctgagaacaatcctccacagtaggatttctgcaataaagagtttgtacagctaatccaactgtccaacatgggtttttcttctgctctaatgactctggtttcttctctcctctctcacccacttgaaaggtaaaaaagtgaaaaaggctttgtagatggaatcaatgtaggatttgcagtagagggaaaaaaaatgtcaaaaagctcaattgatcaagtattattgtaatcattgtacctttattttaggtggactttgatgaaagcaactttttgttttcaagactttagtgggaggttgaggaaggagcttgaagggtgttatttattagtagtagtagtagtgggaagttgtgggaccttgttgagttgtgttcaaattgaagaaaaaacaagtatttgtaatttgtcaccccttgtattattatttattttgtatgactttggagtagtataattaattatcaaataatattattagtttgatctagt

SEQ ID NO: 330 - DNA, 1407 bp, Arabidopsis thaliana
tcttcccaaaaaaaagtgtagaagcagaagaaacccatcatcatcatgatgaactcttctcttctaactccttcttcttcatcttcttcccatatccaaactccatcaacaactttcgaccacgaagacttcctcgatcaaatcttttcctcggccccgtggccctccgtcgtcgatgatgctcatcctcttccctccgatggcttccacggccacgatgtcgactcaaggaatcagccgatcatgatgatgcctttgaatgatggctcctccgtccacgctctttataatggcttctccgtcgccggatctcttcctaactttcaaatccctcagggatcgggaggaggattgatgaaccaacaaggacaaacgcaaacgcaaacgcaacctcaggcgagcgcgtctacagctactggtggtacggtggcggctccgccgcagagtaggactaaaatccgagctaggagaggtcaagcaactgatcctcatagtatcgccgaaaggttacgaagagagagaattgcggaaagaatgaaagctcttcaagaactcgttcctaacggcaataagacagacaaggcatcgatgctcgatgagatcatagattatgtcaagtttttacaactccaagtcaaggtactgagcatgagcagattgggaggtgctgcttccgtttcttctcaaatctccgaggctggtggatcccacgggaacgcatcctccgccatggtcggcggtagccagacggccggaaactccaacgacagcgttacaatgacggaacatcaagtggccaaactaatggaagaagacatgggctcggccatgcaatatcttcaagggaaaggtctttgtctcatgccaatctctttagccaccgccatctcaaccgccacgtgtcactcccgtaaccctttgatccctggagctgttgccgacgtcggaggtccttcccctcccaatctttctggcatgaccatacagtcgacgagtacaaaaatgggtagcggtaatgggaaattaaacggtaacggcgtgaccgagaggtcgtcttctatcgccgttaaagaggccgtatccgtttcgaaagcgtgataacggccgtttacttttggggttaggcagagagataccaaaaacaaagagaaagtggggtgaagtgggagataaagtcaaagtctacgaagaatgaggttgaggttgtttgatgtgttctctgaacgaagccatatttttcgtagagttttggttcttttacctacgcactacaaaaccattcaagggacatttctttttcttttttaaatatatggttgcaatatgttttatttttattaaataaagttggtatcgttgatctgaatattaggctagaaaaagaaaaaaatagtatattggtttttc

SEQ ID NO: 331 - DNA, 1230 bp, Arabidopsis thaliana
aacattcattttcattctcactccccaccaaaaaaaaaaaaaacagaagccatgaactcctcgtctcttctaactccttcatcatctccttctccacatcttcaatctcctgcaacattcgaccacgatgatttcctccaccacatcttctcctccactccttggccctcatccgttctcgacgacactcctccaccaacttccgattgtgcccccgtcactggattccaccaccacgacgccgattcaagaaaccagatcactatgattcctttgtcacataaccatcctaatgacgctctcttcaatggcttctccaccggatctctccctttccacctccctcaaggatcgggaggtcaaacgcaaacgcagtcgcaggcgacggcgtcagccaccaccggtggtgcaacggcgcaacctcagacaaagcctaaagtccgagctaggagaggtcaagccactgatcctcacagtatcgccgaacggttacggagagagaggatagcggaaagaatgaaatctcttcaagaacttgtccctaatggtaacaagacagacaaagcatcaatgctcgatgagattatcgattatgtcaagttcttacagctccaagtcaaggtactaagcatgagtagactgggcggtgctgcttctgcttcttctcaaatctctgaggatgccggtggatcccacgaaaacacctcctcctccggcgaggcgaagatgacggagcaccaagttgcaaagctaatggaagaggacatgggatcagccatgcaatatctacaaggcaaaggtctttgcctcatgcccatctcgttagccaccaccatctccaccgccacgtgtccttctcgtagccccttcgttaaagataccggcgttcctttgtctcctaacctatccactacaatagttgctaacggtaatggctcatcgttggtcaccgttaaagacgctccctccgtttccaagccgtgataacggccatttgtccatttcattttcccttttttgggtgggaaagagagaaaaaagtttagaagacaaagacaagtgggataggtggttttggtcaaagtttagaaagaataaggtcgtgttttcggatacgacaccgtatttgcgtacactttggttttctgtctttacctactacaaaccacccataagcacactcatgttatcatgtttttttttttttggtttataaagttatatccttaa

SEQ ID NO: 332 - DNA, 1019 bp, Arabidopsis thaliana
atggaaaatggaaatggagaaggaaaaggagaattcataaaccaaaacaatgacttcttccttgattccatgtcaatgctctcctctctccctccttgttgggatccatctcttcctcctcctcctcctccgccacaatctcttttccacgctctagccgtcgacgcccccttccccgaccagttccatcatcctcaggagtcaggaggtccaacaatgggtagccaagaagggttacagccacaaggtacagtgtcgaccacgagcgcacctgttgttcgtcaaaagccaagagttcgagccaggagaggccaagccaccgatcctcacagtatcgctgagaggcttagaagggaacgcatcgcagagcgtatgaagtctctccaagaactggttcccaacaccaacaagacggataaggcatcaatgttggacgagatcatcgagtatgttaggttccttcagcttcaagtcaaagtactaagcatgagcagattgggaggtgcaggatcagttggtccacgcctcaatggtctctccgcagaggcaggaggacggctcaatgccctcactgcaccgtgcaatggcttaaatgggaatggaaacgctacaggatcgtccaatgagagcctaaggtcaacagaacaaagagtggcgaaactgatggaggaagacatgggatcagcaatgcaataccttcaagggaaggggctttgcttaatgccaatatctctcgcaaccgcgatatcatcatcaactactcactctcgtggatccctctttaaccccatctccagtgctgtagcagcagaggattcaaatgtaacagcaactgcagttgctgcacctgaagcctcgtctactatggatgatgtatctgcttccaaggcctgaaccatagaatactcatgtgtttcgttttctcagtttaagtcaaacgctaatctccctatctttttactattttctctgctaagcaacaataatataaaacagttgcaacaaagaacaaaaccgac

SEQ ID NO: 333 - DNA, 1763 bp, Aquilegia vulgaris
cactttcaaaactctctctctctttctcttcccgaaactcaaaatttctccggtttatcgggtatcggatctgtaacttgtttcgccgacaacctcgtttttcgattttctctcataaacccaaaacaaaaccctttgtctatttctatgtttaatgttcttcaaaaaccctaacacttcaatcaaacacgcatacactcttactctcttctttctcacaacatggctaataataataatcctacagaaggattaacagatgatttccttgatcagatcttatcttatggtgctcacgaaggtaatttggcgggaaatgatgttaatttggcgggaacaactacacctggaggttcgatggccttgcagttgagttcttctggaggtgatattaccggtagtggtgggtatcatcatcatcatcagcatcaacatcatcatcagttaagtggtggtggtggtggttttccgttagggttaagtttagaacaaagtggtaaaggtggtttttttaaaccagatgaagcttctggaagtggtaagcggtttcgtgacgatttcgttgatttgaaagctgtttcttctactaacaacgataacaacgatagaggagactctgtacatttgaataatttgtttccagcatttggacatgtgcaacaacagcaacaggctcactctgttcgacctccttcacatcaaaatcaaatcaaccagcctttccttgggcatccaacacctggggctgttgctgttgtaccacatccacctgccattcggcctagagtgcgagcaagaagggggcaagccactgatcctcacagtattgcagagaggttacgtagagaaagaatagctgaaagaatgaaggcactacaggaactggttcctagttccaacaagactgatagggcagctatgcttgatgaaattgttgattatgttaaatttctaaggctccaggtcaaggttttgagcatgagcagactgggaggagctggtgcagtagcacagcttgtggctgacattccactttcatcagctgagggcggagccagtgaaggtggcagtaatcagccagcatgggagaaatggtctacagatggcacagaacatcaagtagcaaagctcatggaagaagatgttggagctgccatgcaattcctccaatctaaagcactttgcatcatgcccatttcacttgcctctgcaatataccacgaccaaccacccgatgcctccacaatgatcaaacccgaacctaatgcaccttcataaaatgaaaaggatacatgcaattggacgtgcccatgaacaactccaaacttacaactatcccaccttccatttgttccccccacgtcagacttagtcaactcccctcagcattgcaatcaaagtcagatgccatattattcgttctgcctttcatttttttcgtcaaataggttgtaatgtgatgcctagaaaaataatcataggtactcctgatgtggtgtgggatagtggtggatagccagaacactttccggtggggacccttcttttggatagtggagggtggggcatttttaaagggggaagatgggtacatagacatgattaatgtattagaaggaaactgaaaagggaattgaaatggatattggatagttgttggtcgcttaaaaaagttgtgttggaaggttgcactactcggttttgagtgggttgtgttttttgtaaagtgcttgatttatttttctcaagtatctctgagtcat

SEQ ID NO: 334 - DNA, 931 bp, Aquilegia vulgaris
tcaactgctgttggcagttgtaatggggctgtgaagctcgtgtgagagctcgcaggggtcaagcaacggatccacacagtattgctgaaaggcttcgaagagagaaaatagcagagaggatgaagaatctacaagaacttgttccaaactctaataagacggataaagcatctatgcttgatgaaatcattgagtatgtcaggtttcttcagcttcaagtcaaggttctaagcatgagcaggctgggggcaacaggggcagttgttcccctcattacagaaaatcagcctgagggatctactagtcattttctgtcgcagtcagctggtcgagatgttaaacatattgaatctcctaacacccttacatttgagcaagaagtagtgaagctgatggaatccaacatgaccaaagctatgcaatttctgcagagaaaaggcctctgcctaatgcctattgcccttgcagctgccatttccggtagtaaagcaccacccgcctctctttctactgagggaaagaagtctattttgaccaatggctttgttcatcataacagtgggcaatctaacattgggccaggtcagatatcatctgatggagagactagatcagaggaaaacataattgggattcacagcagagaagacttttcaagcaacagctgcagtgggaccagcattaaaaaagagggaacaaacaccacaaacttcaccagagaaatgaatcaagagtagacatagttttgccggtctcaatctttgtggcttcatacctggtctccaattctcaagtttcagtaacctagcaagtagataagtagcagagtctgggactgttttgttttttttttctcgcttcaaagatgagaatgtggtatagatttctaattatacgttataggtttcattgtacatgcacacatatatgc

SEQ ID NO: 335 - DNA, 838 bp, Brasssica napus
cccacgcgtccgaaacaccttccgatgacttcttcgagcaaatcctcggtctccccaacttctcagcctcttcatccgacggcgggttaggcggaggaggagcaccgccgatgatgctgcagctgggctccggcgaggaaggaggtcacatgggtgggctaggaggaggaagtgggtttcacaaccagatgtttcctctaggtttgagtcttgaacaaggcaaaggacaaggctttcttagacccgaaggtggtagtcttggaactgggaaacgtttctctgatgacgtcatgaaacccgtttttcatgggcagccaatgcaacaacagccagctccagcggcgccgcatcagcctacatcgatccgtcccagggttcgagctaggcgtggtcaggctactgacccacatagcatagctgaaaggcttcgtagggaaagaatagcggagcggatcagggcgttgcaagagcttgtacctactgttaacaagacagatagagctgctatgattgatgagattgtggattatgtaaagtttctcaggctccaagttaaggttttgagcatgagtcgtcttggtggagccggtgcaggtgctccacttgttactgatatgcctttgtcatcatcagttgaggatgaatctggtgaaggtggaagggcaccacaacctgcgtgggagaaatggtctaacgatggcactgaacgccaagtcgctaaactgatggaagaaaacgttggagcagcgatgcagcttctttcatctaaggcgctttgtatgatgccaatctcattggctatggctatttaccattctcagcctccagatacaacttc

SEQ ID NO: 336 - DNA, 1291 bp, Citrus clementina
caaccgtgttacaccgacccatctgctgctgcttcaaactccgctgatgacatacccatgttcctacagctgggctccggcggcccttctcctggtgccggaggaggcgccaccagtgctgctgacataagaagtttggctatgggaatcagcatgggaatgatgcctctagggttaaatttggagcatagcttcttaaggcagcatgaagatcataatagtaaccataacaacaacaacaacactaatgcttcttcttcttctcctaataattcttctgccacttctggaatcaacgagagagattccgtgcacatgccaagtttgtttccagcgtttggacagttgcaaagtcaatcagcccggccgccgctgccacgtcctcctcaagtacagcagtttcagagccaaccagcagccgcaccgcagcctccagctgtccgtccaagggtgcgagcaagacgagggcaagccacggatcctcacagcattgccgagcggttgcgtagggaaagaattgcggatagaatgagggctctgcaagagctggttcctagctgcaacaagacggatagggcagccatgcttgatgaaatcgtggattacgtgaagtttctaaggcttcaggtcaaggttttgagcatgagtagactgggtgcagctggtgccgtggctcagcttgtagctgatgttcctctgtcatcagctcttgagggagagagcattgatggtggaagcagtcagccagaatgggagaaatggtcaaatgacggaactgaacaacaagtagccaagctaatggaagaagacattggagctgctatgcagttccttcaatccaaggcactttgcatcatgcccatatcacttgccagtgcaatctatcgcacccgtcaaccggatgccccagcattcgtcaagcctgaatcgagcaccccttcatattgtctaaacaacaattggagtcagcagttggctcacaatgactcaaaatatttaatcacgggtacctattcctatagaatacttttggtcctcttatccaaccaaataattcaaattccaatgcaacgttcccattcttctttcccttaattaacctagggcaaaaaagggaaatgaaaagaaggcaatgggcaatggcaagggggaaaaaggggaatttttttccaaagttttttttttttataaaaactccccttttcaaaaaaaattataaagggggggggggggttttttaggggggggggaaaaaacccccaaaaaaggttttcggggggtgttttatatg

SEQ ID NO: 337 - DNA, 1344 bp, Curcuma longa
gcacccgttgagacctaaccttccccgggaaactggcggctgtgcctatgcaaccgagcagcaaagagacggaaaggatggcgcagtcccacgccgccctccagctggagctccagaacggcggcggaggcgcccagaacgacgatttcttcgagcagacgatgtccggcttctccaccgccgcctgggcaccggagttggggacccccaggtcgcttttcggggcgcggtcttcggaggagtcgccggacgacgagggattgaactacgccccaccgtacggtgggtcgtctcttctcgcctcgcggcaccggatgcacctcggcacctcgccggcggattcgtcgatgtttctccagctcggtgggcagattctgttacatcctacggccggcgcctccgggggcgagtccgggggcttcctccggttgcccctctccctcggtagcggaggctctggggtctcgacttctgccatcttcggcgacagatcccgaggagaaatcgacccgccgttcgaatcgtccaatcccaccgaggctgaggtgttgtataacgacggattcaccggatcgcttccacgggcggtgcaagcgtcccttcatcagcaactcctccgacaaccccagaactacggagctgctacgctgaccggacaggctcttgcgataacagcaacggcttcaggtaccgccggcgcaggtactgcgccacccaagccgagggtgagggccagaagaggtcaagcgaccgatccccatagcattgccgaaagacttcggagggagagaatcgcagagcgtatgaaagctctgcaggaattggtgcccaacgctaacaagacggacaaggcgtcgatgctggacgagatcatcgactaccttaaatttctccagctccaagtcaaggtcttgagcatgagcagattgggcggagcagccgccgtcgccccgctcgtcgctgacatgtcttcagagagcggcggcggagcgggaacgccgaggagtaataacgatggcctgacggcggcggagcagcaggtggcgaagttgctggaggaggacatgggttcagcgatgcagtacctgcaggggaaaggcctctgcctcatgcccatctccctcgcctccgccatctcctccgccacctgccgtcctcggcctccccccggtgtcaacctccgctacccggcagccggcgacgcgcctccgtcgccgagcatatcggcgctgacagtccaatcgtccaacgccggcagcgccggcgccgacgccagctaggatggagctgttcgttaagatcgctgtccaaaaagtgcttggaattggaatttcaatccttagt

SEQ ID NO: 338 - DNA, 1235 bp, Citrus paradisi hybrid
cgactttgccgagtcaaactcatggcgaacaacccgaacgaagcctcctcgactgacgatttcctcgagcaaatcctcggaattcctaatttcggttctgcggagtccggcttggcggctagcgatggcggcttggctgcaggctcgccgatgatgctgcagctgagctccggcgacggctccagccacatctcggctctcggaggcggagtaagtagtgggtatcatgggcaggtgtttccgttaggcttgagcttggagcaaggtaaaggaggatttttgaagcccgaggaagcctctggaagcggaaagcggtttcctgaagaacatgctataaaaaatgtttttcatggccaaccactgccctcacctgttcctgcagctccacatccaccagcaatgcgccccagggtgcgagctagaagaggacaggccactgatccacacagcattgctgaacgtctacgaagagaaagaatagcagaaagaattagggcactgcaggagctggtccctagtgtcaacaagactgatcgagcagccatgcttgatgaaattgtggattatgtgaagtttttgaggcttcaagtgaaggttttgagtatgagtagagtgggcgctcctggcgctgtggctccactggtaacaaccgacctcccactatcatcagtcgaggatgaatctggtgaaggggtaagaaaccaaccagcctgggagaaatggtcaaatgatggcacagagcgacaggtagctaagctcatggaagaaaatgttggggctgccatgcagttccttcaatcaaaggctctttgcataatgccgatctcactggccacggcaatttaccattcgcagccaccggaatgaagaggtaggatggataatggttggttgtttgaaaatgcttagtgttttcccagtccaacataaaatgatagtgcttgctttgtcgaggaggcgtgggctttgttttcaaaaagtaatttgacttctttctcattttctcctgagtcattcattattggagggcgacggggctgctgacgatggctgatggctgatggcattggtattggtggactgcgtttggtataaattacttacgtatttgaacttaacctgattttcaattctaaagtcatttactgcggtacaaaatttgaaaaatctattactgaatttagttgataataaccaacttagcgtgttcctttcggggatcatccatccaactc

SEQ ID NO: 339 - DNA, 1916 bp, Citrus sinesis
ggggaaacaccaaattccttctctccctctctctccctctctctctctcttcttcctgttctcacctatttagtatttaacatccatcagaagaatggtttccattctcttgaagaaactcttgactcttcaaacttaaatttccatatcgtaaagacttattctcaagaaattaagatgcagccctgcagcagcggcggagaaatgcaaggaatcagctcgctcttgagcaacggaagccacgagcagcagtcgcagatccatcaaagcgcgacgtttgatccaacttcgcaagacgacttcttagagcaaatgctatcctctctcccatcgtgttcttggactgacttgaagtctccctggggggttgttgaccttaaccctaataacaataataataatattaacaacaagcagcccagagacttatccgacgaaacggcgccgtccactactcaagagaataatgtccctgcagggtttcagttcgacgagtccatgattttagcttccaagatgagacagcatcagatcagcgggaatactgggagtgggaataataattctgctgcagcaaagtttatgatgcagcagcagcagcaacaaatcatgatggctgctgctagaggtggcatcgggttgcctttatcacttggaaatggtggcgataacgacatcgttgatgtctcgtcattcaagtcccaacagggaggagatggctcagtgcaagcactctacaatggcttcactggatctttgcatggctcaacccagcctcaacattttcatcatcttcagggaggatcgatgcccgggcagacctttggggcaccagggccggttatgaaccagacgcaggctcaggcaagtgggtcaaccggtggtggtggtggtggtggaaacacacccgctcagcagcctaaacaaagggttagggctaggagaggtcaagctactgaccctcacagcatagctgaaagattgcgcagagagagaattgcagagagaatgaaagctcttcaagaacttgtacctaatgccaacaagacagataaggcttcgatgctggatgagatcattgactatgtcaaattcctccagctgcaagtgaaggtcctgagcatgagtagattgggcggtgctgctgctgtcgcaccccttgttgctgatatgtcctcagagggaggaggaggtgattgtatccaagcaaacgggcggaaccctaacggagctcagacgacgtcagctaacgacagcttaactgtgacggaacaccaagtggctaagctgatggaagaagatatggggtcagccatgcagtacttacaaggcaaagggctttgtctaatgcccatctcacttgcaactgctatatcgactgccacgtgtcactctaggaaccccatcatcagcaccagcaacaacaacaataacaacggcaatccccaccacaatcctttgcttcagtccaatggtgagggcccgacctcacctagcatgtcagtgctgactgtccagtcagcaactatgggtaacggtggggctgacggctccgtcaaagatgctgcttccgtttccaagccttgatcaacggcgtcgaccgactttatgatgcggctcgtccaaagtctacgaaaataaggcgtcactagatgttggaccttcacgacgtcgtatttgtgtagactttgtgactgaatctaacaaacaacaaaaaagcaagaaagaagccaatcccaagaacaaaaaccttattttatgttattattattattttaatttgcgggttaggttttgttaattttactattattaaatttttaatttctcagatgggatatctccctctttttcttttatttaatattctctgtcatgattctctattaaataattatttacaaaagcctttaatc

SEQ ID NO: 340 - DNA, 1835 bp, Eucalyptus grandis
agcactttcacttatcagaggccgaaagcaaaaccccctgaacacttcaaagaaaagaggttttttcagacaccctctcgccctctctctctctctctctctgagctgagagacaataccagcttataaaacccgagacccataaaacctcccatcggaattcccgaatcacgttaccgggtcatcgggtttcggatctgccacccagttcaccaacaccaccaccaccaccttccttccccccctcctttttgggtttcccaatgagcacatctcacctccacttcctccctccccttcccttaaacattctctcccaccaataatttccacattggcaaccaatttcttattcatcatcccctccccgagtcccaccaaccttaggctctctctctctctctctctctgccactcaatctttccacttagaaagaaaccaactttttgctgggtttcgcatagagcagaaaacccatcgtagactttgatctccagttgacacttctatagagaaagggagatagagtggagagagagagagagagtttataatcatcggcttatggcaggctcaaatccgcaggaaggactgggggatgagttctttgagcagatcttggccgtgccgcccggagcttactccggtggctccacgcccatggtcttgcaactcggctccggccgcggcggcgtggaagatggcggcggcagaggaggcggcggggggctgaggggcatgggggtgatgatgcccctggggctgaatttggagcaaggtggattgtttaggcacgaggatgttgagaacagtactagtgcatcttccaccacttctgccatcaatatggagagagaagcaggagtccaccacggcaacaacatgacaagctgcttgtttccagcatttggacagttccagactcatcagtcagtccagccacctcctccccatccaccccctcctcaacttcacccggccttcttgaatcagcccgcagtgggatcgccgaaccagccggcgatacgcccaagggcacgagctagacgagggcaagccacggatcctcacagcatcgctgagcggttgcgccgagaaagaattaatgaaagaatgaaggcgttgcaggagttggttcccagttgcaacaagacggatagagcagccatgcttgatgaaatcgtggattacgtgaagttcttgagactccaagtcaaggtcctaagcatgagtagattgggcggagctggtgctgtggctcaacttgtagctgatgtacccctctcatcagctgagggcgagatcatcgaaggcgggaacaatcaaccggcgtgggagaagtggttgacagacggcacagagcagcaagtggctaagctgatggaagaagatgttggggctgcaatgcagttcctccagtccaagacgctctgcatcatgcccatttcgctcgcctccgcaatcttccgcacaagccaaccagacatgccccggtccatcaagcccgaatccagcgccccttcctgaagcaccctgaacaagttcctggcgacatcatagttgcaacaatgcctaggtttctcaggtctgaccggttcgaggttgtccccaagtcgacgtaactcctttgccaaccaagttgcttagtgccctctgttcatagttcactgtcgctgtcttagagtgggtgtgaacttgtggttctcatgccttaattacaacctaaaaaaatgcatcagtttcatgttttttccaattcatccaaggaaaagtcaaaagcaactttattccaaattcagcttattaaaacctatcttctgatgaaaaaaaaaaa

SEQ ID NO: 341 - DNA, 1765 bp, Eucalyptus grandis
cctcctcgcgtccctctgcgttccgccagctaaccgaaattccggccacccccgccggagctccgccgtgaaaccctctctccgtctccgcctccgcctccgcctccgtctccgtcgcttccttccgccgtcgcgaccgtagatagatgcccttcccgcccgctcatggcgaacaacccgagtgacggcgccagcgacgagttcctggagcacctcctcggcctccccaacttcgctgccgcggcggaggccggcctcgccccgggcgacgggaccggcctgtccgtcaccgcggccaccccgatgatgctccagctcggctccggcgacggctccggcggccacggccacggccacggccacggccatggccaaggccacttgtcggccctcggcggcgggggagcgggggcggggggcggcggtggcggcggtggcggggggtaccatggggcggtgttcccgctggggctgagcttggagcaggggaagggagggttcctgaagcccgaggaggcgtccgggagcggcaagcggtaccccgaggaggtcgtcgacggcagagcttcgactgtgaaaaacctgcactccccgttgcccaacttcccagatgtttcgcaaatggcttcttttaggaaccgagatgtgtttcatggacaaccagtgcccaaccctgttcctgcagcaccacatccaccagcaatgcgcccgagagtaagggctagacgaggacaagctacagatccccacagcatcgctgaacgattgcggagagagagaatagcagaaaggattcgacaattgcaagatctggttccaagtgttaacaagacagatagagctgccatgcttgatgaaattgtggactatgtgaagttcctgaggctccaagttaaggttttaagcatgagcagattgggcgcagctggtgcagtggccccacttgtgaccgacatcccactatcatcagtcgaggaagaaggcggtgaaggtggaagaaaccagccagcgtgggaaaagtggtcgaatgacggcacggagcggcaagttgctaagctcatggaggagaatgttggcgccgcaatgcagttccttcaatccaaggctctctgcatcatgccaatctctctagccaccgcgatctaccaaactcaaccgcccgacacctcctcccttgtcaagtctgaaagcaatccaccatcctagaccagccacaacacaggcacctcccctttttccaggtcccaccaaaggctcaagacttaaatgctccttggtccccgctttagtttgtcccgtttctacaccttcaaaaaccagttgatggcccttcttccttcctcaaattgcaatcaaagtcagatgccatagcccttgcttttctgccctctctttaagcttttcgcccggacaggttcaatgtcaatgcctaataaaatactagcaggcccttcatgtcttgccaagttcaactaaaggagagatattcaaaccctcacttgatatgctctctctctctctctctctctctctctctctctctctctctctctctctctctctctctctctaccaatagaatatgcttagtggagaatgatgtgagcgactttatagtgggtgggggctcttgtttttcttggtagtgggtcgtgggaccttgtaaaagggattggttgtgtaaagtaccatttgtataatgtaatgcgtaatgtgttcgatgagggggaatggattgcttggtagaaaattgagaaaaaaaaaa

SEQ ID NO: 342 - DNA, 796 bp, Gossypium hirsutum
cgatagtggtggtggtgggtttagaggaataggcatgatgcctttagggttgaatttggaacatggattcttaagacatgaagatggagttgtagttgacaacaacaacaacaatgcttcttgttcagctgcttctgctgtttctggaatcagtgagagagattctatgcatatggtaagcttgtttccaccttttggacaaatgcaaactcagcaaatccgcgcttcaccgccacctcctcagcctccaccgcagctccaccagccatttcacagccagccaacatcaggtccagttgctgctgcaccgcacccacctgccgtccgtccaagggtacgggctaggcgaggacaggcaacggatccccacagtattgctgagcggttgcgtagagaaagaatagctgaaagaatgaaggctttgcaagagttggttcctagctgcaataagacggatagggccgctatgcttgatgaaattgtggattatgtgaagtttcttagacttcaagttaaggttctgagcatgagcagactcggtgcagcaggtgcggtggctcagcttgttgccgatgtacccctactatccgttgagggtgatggtgcaggaggtggaacccagcctccttgggagaaatggtcaaacgatggcactgaacagcaagtcgctaagctgatggaagaagacatcggagctgccatgcagtttcttcagtcccaggcactttgcatcgtgccgatatcactggcatctgcgatcttccctgcacatcaacctgatgcaccaacaatcgtc

SEQ ID NO: 343 - DNA, 918 bp, Gossypium hirsutum
atgataagcaatggaggtgaatcttctgagtttcggagatcatttacaggcttggaaactctttctccaattccacaattatggcatctacaaccttatgactctgtttcttcccttcccactttggtgggacaaaccatagtagatgatgaaggcaatattaacagatttattgagattgatgaaattctgcaacctgagaacttatctgcttccatcaattcaaagggacaacaggacatgcaaaattccttttgctcttcttttcccgctgaccaccctataacaaagaccatgattgggttgccatctctggtgcagggtgcatcgcctaacctgaacaatggttccgaccgaactgtgaagcctcgagtaagggcacgtcgaggtcaggctactgatccacacagcattgcagagaggcttcgaagagagaagattgctgaaagaatgaaaaacctgcaagaacttgtacctaattccaataagacagacaaagcctctatacttgatgaaatcatagggtatgtcaagtttcttcaactccaagtcaaggtactaagcatgagcaggcttggggcagcagctgcagttgttcctctcatcactgatggtcgagctgaggtatctaatggtttatcacttgcaccattagcgggtcaaggggttgatttttcaccatctcctgatcaagttgttttcgaacaagaagtggtgaagctcatggaatccaatatgacaatggccatgcaatatctacaaagtaaaggtttctgtcttatgcctgttgcacttgctgctgccatatccaatgttaagtcatccacatcctcatcgtcatcatcagttcctgcttctgatgagagtaagaaacttgggcttcaccaacagtactctaatcaacaacacctgcagcag

SEQ ID NO: 344 - DNA, 1530 bp, Gossypium hirsutum
aaaaacccaacactctttttcattcctctgtttttctctctcccactttccgtttctctttcagaaaaaggaaagttcaagctaagctaaaactctgaactttccccttctcagtctcctcagggacagagaaagattaaacgaaaggaaaagaaaaagacttcttctttttttccctaaaagaaaagttgatctttttttgtttggttcgattctctttagccatttcctttttgcatgtagatgctctttggtagccttaactcgccacttcgactcacttcaatccatggctaataaccccaacgagtcccccgctgatgatttcctcgagcaaatcctcggactctcccactttgcgcctactgagactggcttagcggggcccgacggtagattgtctggaaacgccacgacggctggagcgccaatgcttctgcagctcagctccggcggtggcaccggacacatcggcgctataggcggcggtggaggcggtgcgtttcacggacaggtttttccattgggattgagcttggagcaaggaaaaggtgggtttttgaagcccgaggaagcatccggtagcagcaagcgcttccgcaacgaggtcgttgatggcagagctttttctgttaaaaacgttttccatggacaaccagtgccagctactgttgctgctggaccacatccaccagcaatgcatccgagggtgagggctagacgaggacaggccacagatccacatagcattgctgagcggttgcgcagggagagaattgccgaaagaatccgggcattgcaggaacttgttcctagtgttaacaagactgatagagcagccatgcttgatgaaattgtagattatgtgaagttcctgaggctccaagttaaggtcttgagcatgagtaggttgggcgcagctggtgcagtggcaccactcgtaacggacctcccactatcgtcagttgaggatgaaagtggtgagggaggaagaagccaaccagcctgggagaaatggtcaaatgatggcacagagagacaagtagctaagctgatggaagaagatgtcggagctgccatgcaattccttcaatcaaaggctctttgcgtcatgccaatttcactggccaccgcaatttaccatacgcaatctccggatacctcctctgttgttaagccggaaacaaatcctccttcatagacacctcacatgagaaaaagaggaaaagaaaacggtgtatcatatggtgggggagactgtggacaaagacggaagcacttttcttgtgtagtgatggggcatggatttttgggtttggtgggatgagggacccgcaaaaggagatggatgagatgagtatatttacatattataacaataaaatattacaatattgatagtgttagtgtaagtaacagtgtaatttcacaggaaagggctaaagtagaagaagggataatggttggctgattttataaaatgctgattcaataaaatagatggattggttcacgtttcaaaaaaaacct

SEQ ID NO: 345 - DNA, 1561 bp, Gossypium hirsutum
aaaaaaagaagaggaaagccaaaactccaaactttctattttgcttttatattatatttttttttggttcaattcagtttcgccatttcctttgcatgtagatgctctttggttagtccctaacgccgctacttggactcactttccgctgctatcttttttccggctttctcatggctaataacaccaacgaggcccccgccgccgatgatttcctcgagcaaatcctcggcctccctaactttgcgccctccgaaacgggcttagctggatccgacgctggattggctgcaaccgctgctggagctggagctccaatgtttttgcagctcagctccggtgatggcgccgctcatatcggtggaatcggcggcggtggaggcggtgcgtttcatgggcaggttttccccttgggcttgagcttggagcaagggaaaggcgggtttttgaaacccgaggaagcttccggtagtgggaagcggtttcggaacggggtcgttgatgaccgagcttcttctgtaaaaaatgttttccatggccaacccatgcaagcaactgtttctgcagcaccacatccaccgacaatgcgtccaagggtgcgcgctagacgaggacaggccacggatcctcacagcattgctgaacggttgcgcagggagagaattactgaaagaatcagggcattgcaggaacttgttcctagtgttaacaagactgatagggcagtcatgcttgatgaaattgtagattatgtcaagttcctgaggcttcaagttaaggttttgagcatgagtaggttgggcggagctggtgcagtggcaccgcttgtaacagacattccactatcatcagtagagtatgaaagcggtgagggtggaagaagccagccagcatgggagaagtggtcaaatgatggcacagagcaacaggtagctaagctgatggaagaaaacgttggagctgccatgcaattcctccaatcaaagtctctttgcattatgcctatctcactagccactgcaatttaccacacacaggtaccagatacctcctctgttgttaagccagaaacaaatcctcctgcatagacctgaggggaaaaaaagggtaggcatcccacagtccatccttcatcccgccttttatttgtcctattctaacacacccactccctccctctctggcttgaaaatgccatcaaagtcagatgccatagctcttgctttttgccttcctttccagctctttttcgatttttcaaaacagggtttgatgtcaatgccttaaaaaaatcagagacaggcaattgatgtctcgacaagttcgagtaaaggggaagaattgtcaaatttcacttgatatgctcttcttttttgtatcaaaatgggatagtggacaatgatgggagcacttttgtagtggggctctgattttgtggttagtggattgtgggacctgcaaaaaaaaaaaaaaggatagagatgatccagggtataatattgttattgtaacaatgtattttgaagataaaatcgaatgcaaaagtagaagaattgatatt

SEQ ID NO: 346 - DNA, 1411 bp, Gossypium hirsutum
aaaaaatccctttgaaaaaaaaaattccctcttttcctttctgttactttcacagagctgaaagtacagaacagaaaagaaaccccaaacctcaaaattttctctttctcacgttgatagaaggatttaagctagaacggcaaagatatgaaataatatcgtgttttttgtctataaatattttgttgggttttcaattcttttttcgccatttcttttgcatgttgatgatctttggtggctttaactcggtacttggactcacttccgctactacttcttcgggtttcacatggctaataaccccaacgaggcttccgctgatgatttcctcgagcaaatcctcggattccctaacttcgcgccttctgagacgggtttggcgggacccgacggtggactgacaggaacaactgctggtgccggaacgccaatgtttctacagctcagctctggtgatggagccagtcatctcggcggaatcggcggcggtggaggcggcgcgtttcccggacaggtttttccgttggggttgagcttagaccaagggaaaagcggcgggttcttgaagccggaggaaggttctggtggtagcagcaggcggtttcgcgatgaagtcgttgatggcagggcttcctcagttaaaaacgttttccatggttcaccaatgccggctaccgttgctccatcaccgcatccaccaacaatgcgtccaagggtgcgggctagacgaggacaggccacggacccgcatagcattgctgaacggttgcggagggaaagaattgccgaaagaatccgagcattacaggaacttgttcctagtgttaacaagactgatagagcggtcatgcttgatgaaattgtagattatgtcaagttcctgaggctccaagttaaggttttgagtatgagtaggttaggcggggcgggggcagtggcaccgcttgttacagacatcccattatcatcggtcgaggacgaaagcggcgacggtggaaggaaccaaccggcatgggagaaatggtcaaacgacggcaccgagcgacaagtagccaagctcatggaagaaaacgtaggagctgccatgcaattccttaaatcaaaagctctttgcattatgccaatctcactagccaccgccatctaccactcgcaaccactggatacctcttctatcgtcaagcccgaaacagatcccccaccataactctaacaaacaaaaaataagggtatgcatcccacacagcccatcctatatgtccaacactatgaggaaaaaaaaaggaagggggggccttcatgtccggatttgtcaatggtgatctcttttgtagtcaatggtgggggtaggggataatgatggaagaagaggggcactctcatagtgggggctttaaatttttttgtt

SEQ ID NO: 347 - DNA, 1526 bp, Gossypium hirsutum
caaaaagaaaaaaagagaaactcgtcccttcatcttcaatctcattcatcatcaaagcaaaaaaaaaaccctaattatgcagccttgtagtcgtgaaatgcaagcaatgaactctctcttaaacccgacccaacaaatccctctccaagaccttcaaatcaacggtaacagacaccaccatcaacagatccacgtcccatcatcatcgcagttccagtatcccacacccacttcaacaacccaccatgacgacagcttcttagaacagatactctcctccaccacgtccttcccgtggtccgacgaaacgggtcctcccaaccccgaggataacaataacgccggcttcaactacgatgagatggttctagcttccaagcttcgacagcatcaaatcaacggcggagctgctggtaacccttttgccgctatgaagatgatgttgatgatgcaacaacaacaacagcaacagcagatgatgttagcgggaagacccacggttgcctccgccgccgccggaggcggaatcaccaccaatcatcagggtggagagggttccatgcaagctttgtataatgtttttggcgatggatctttgcatggaactatgcaggcgaaaagctttgtgggggctaattcagcaacagagatgacccaaagtcagggaagtggtccgacggccggagaagcggtgacggcgccggaaaagcctaaacaaagagttagggcaaggaggggtcaagctactgacccccacagtatcgcggaaagactacgtagagttagaattgcagagagaatgaaagctcttcaagaactggttcccaacgccaacaagacagataaagcttcaatgcttgatgagatcatcgactatgtcaaattcctccagctccaagtgaaggttctgagtatgagcagattgggtggtgctgctgctgttgctccccttgtttctgagggaggtggcgattgtattcaaacaagtgccaatggtgggtcccatccacgaaattccaacggcgaccaaacgccgtcggccaacgacagactgacgatgacggagcaccaagtggccaagcttatggaagaggacatgggctccgccatgcagtatctgcaagagaagggtctgtgcctcatgccgatctctctcgccaccgccatctcaagcgccacgtctcgttcaaggaaccccatgatcaaccatgaaaacccggccaacggcagccaccttttgattcaatcaagcggcggcgatggaccttcctcgcctagcatgtccgtgttgacagtccagtcagccaccatgggtaacggtggccttgaaggtggcgcagcctcggtttccaagccctgataacggcggtgactgacatacgtagagaggaattgaagggaaacagcttttagtctatgagaataaggcggtcttcttcccaagtattttcttaaaagtacgaaacgacgccgtatttgacgtagacttataagctaacccctaagactgacctcatccaatcaac

SEQ ID NO: 348 - DNA, 1052 bp, Glycine max
ggattcatgaagcccgacgaagcctccgctagcggaaagcgctttcgcgacgacgtcgttgataatagagctaagcatgtttttcatgggcaacccatgcctactactatgcctgctgctcctcatcctccagcaatacgtcctagggtgcgggccataagaggacaggctacagatccacacagcatagctgaacgattgcgcagagaaagaatagcagaaagaatcagggcattgcaagaactggttccaagtgtcaacaagacagatagagctgccatgttagatgaaattgtggattatgtcaagttcttaaggcttcaagtgaaggttttgagcatgagtagactgggtggagccggtgcagtggcaccactggtaactgacatcccattatcatcagtcgaggaagaaggtggtgaaggtgcgcgaaaccggccagcatgggacaagtggtcaaatgatggcacagaaagacaggtagctaagcttatggaagaaaacgttggggctgccatgcagtttcttcaatcaaaggctctctgcatcatgccaatctcactggcatcggcaatataccagtcacaaccaccggacacttctagcatagtcaagcctgaaactaatcctccttcatagacctaattcacatgttgcacaatctattattattggtcccatcccaggctcacctaatacttgctgggacccacacctaacgcgttatttgtctgttccaaatccccccccataaaataagtcattggcaagcatcaagttgcaatcaaagtcagatgccataattcttcctttttttgcctttctttcagcttttgtcaatacagggttcgatatcaatgccttggaaaagacaagcaaacccctatatcatgtcttgccgtatttcaagtagagaggaagacattgtcaaaagttcaattgatatgcgcttcttttctagtgtcaaatgggtgggggtagtggaccatgatgtaggcgcttttatagtggggcttagtttttgtagtgggctgtgggaccttctaaaaggt

SEQ ID NO: 349 - DNA, 1490 bp, Glycine max
gtccaacaacaacaacgacgctactactaatgtcgcatctttttcctccttcgatgagcactccaccttagcctccaagttccgcaaccaccagatcagctccaataacaacgcgcccaaaaacgccgcggcggcggctctcatgctccaacaccaactcctcagagactctggtcttctcaacatgcctctttccttgcccggaaacgacgtcgtggttgacgcttctaccttcgaatcccccaatccgagtggtaaagcttcagtccaaactctctacaacgggttcgccggatctctgcatggcgtaggccaatcctcgaaccagactcaacattttcaacaccctcagggaagttcgaatccgatgcaagggcaaaattttggggcggtgccagctggtggtggtagcgcgacgaatcaggctccagcgagtggcgctgccgcgggtggcgcgccggctcagccgaggcagagggttcgagcgaggagaggtcaagccacggacccacacagcatcgctgaaaggttacgtagggagagaatcgccgagagaatgaaggccctacaagaactggttcccaatgccaacaagacagacaaggcatccatgctagatgagatcatcgattacgtgaagttcctgcagctccaagtcaaggttctgagcatgagcagattgggcggtgctgctgctgtcgctccccttgttgctgatatgtcctctgagggaggcggagactgcattcaagccaacggcaagagtaacggcggtggggcccaggcttcaaccaccaacaccaacaccaaccaaacgacagcgacaacaacctcaaacgatagcctaacgatgacggagcaccaggtcgcgaaactaatggaagaagacatgggttcggctatgcagtatcttcaaggaaaaggtctttgcctcatgccaatttcacttgccactgcaatctccactgccacgtgtcccaccaggaacgttaacgttaaccccttgatcaacgccgccgccggagccacccattttccgaccgcagccaaccccgccggcgaagggccgtcgtctccgagcatgtccgtactgacggtgcagtccgccatcgcaggcaacgacggcgccgcctccgtttcgaagccgtgatgacggtgtttgagtgactttataggaaaaagaagaaaaaaacaaagtgaacaaaggacagaaaatgacgtgtgtttttttttcttaaaaaaaaaggagccgttaaagtctacgaaaataaggcgtcagggatacggaggactcgacgacgccgtatttacctagactttgtttggctgatgctaactttcaaccaaccaattacaaactccaccatgccaattacctacttcttcgtcttctttttctttattattattgttaattgttaactgtcgctttgggtttcttctgttcattgtttttaaaaatctggagtggaatttctctttttggtgtt

SEQ ID NO: 350 - DNA, 1850 bp, Glycine max
ttttcttcttccttttcgtgctctctctcaaattcaacacgagagacacaaaacaaaacattctcgggaagcgtaaccgcccagaattccgaccattttcacagaccttgttttctgctcttgatgtttttcaccccccaaatgtggcaataaaaaacgggtggcttaatttgacacaatcggtggttattgcaaagttgagatggcaggtaatagtggttcagaggggttgggcgatgatttcttcgaacagatcttagcagtgcctgaagccggcacagtgggaatgttgcaattggggtccacaactggtgctttcagaggagcttctgggttaatgcctctgggcttgaatttggaacaagctgccttcctaagacaccaagttaacgttgacgacgacgttgttcatgttaatgttgatgatgccaccatccaccaacatcacctcactctccataacaacaacaactcctcatcaccctcttccactgcaccaatcaccgatagggattctatgcatatgaggggtttattttccgcgtttggacaactgcatactcctatccgccccacgctgccattgcctccaccacctcgtcagccacaactccacctccaccatcataaccaatttcagggccaggcagctgcagctccagcgtcaatggctgctatgccacaaccacctgggatccgccctcgtgtgagagcaagaagagggcaagctacagatcctcacagtattgctgagcggttgcgtcgtgaaagaatcgctgaaagaatgaaggcattgcaggaattagttcccagcatcaataagacggacagagcggcgatgcttgatgaaattgtggactatgtgaagttccttaggcttcaggttaaggtcctgagcatgagtagactgggtggagctggtgctgttgctcagcttgtggctgatgttcccctttctgcagtggagggggatcaggacatagaaggtggagccaatgagcaagcctgggacaagtggtccaatgatggcacagaacaacaggtggctaagcttatggaagaagatgtgggagcagctatgcaatttcttcagtccaaggcactttgtatcatgcccatatctctagcctcagccatttttcgtatgcctcaatcagaagcatcaacaggcatcaagcctgaatctaacagtcactgatattagcgatagaaccgaaacaaaaagtatcatgacagacactagataattaaatttcttcatccttaatttatgacaagggtaatattctactttcttgtataatttaattttcctgattggatggagaaggatctagtcggtgcagcagctggttcactcttctcaagttttgtcaaagaaggagtaattgttattcctattaagtaaaatcggaggagccaagcaaatgtccttttcatggtgaagattaatattttcaatggccttattcaagtttttcttgcaaatatctgtggtggggttggtggtggatgaccaaaatatttgtagtggaacctcttttcttggtttagtatttttagtcagtggggagtgggaccatttaaaaggaaaggatggttacgaatgatgtatcgggagaaaactttaatacaagttgaattataatatggttagttaccttgtaaagatgttttggaagcatctgaccattggaaaagctaaagatattttaaaataatcacacattttgagtcttgtttgcttctaaaacaagtgatttccagcacaaaattaggtgagagtactgaaccgactgcttgctgagaaagtggaaaatgacagtttgttaatttactgaacaaaaaaa

SEQ ID NO: 351 - DNA, 1392 bp, Glycine max
cgcgtccgctccgccgacgcctctccgatgatgcttcagctcaactccggcgacgccgccacccacctagcctccttccacgcgccgccctaccagctcggcctcagcctggaccaaggtgagggacccttcctcacgcctgaggacgcttctggaagcggcaagcgcttccgcgacgacgccgttgataccagacctaacaacgtttttgatgggcaacccatgcctacaactgttcctactgctccacatccaccagcagtgcgacctagagtgcgggctagaagaggacaggctacagatccacatagtatagctgaaaggttgcgcagagagagaatagcagaaagaatcagggctttgcaagaactggtccctagtgtcaacaagacagatagagctgccatgctggacgaaattgtggattatgtcaagttcttgaggcttcaagtgaaggttttgagcatgagtagattgggtggagctggtgcagtggcaccactggtaactgatatcccattatcgtcagtcgaggaagaaggcggtgagggaagaaaccagccagcctgggagaagtggtcaaatgatggcacagaaagacaggtagccaagcttatggaagaaaatgtgggtgctgccatgcagtttcttcaatcaaaagcactctgcatcatgcccgtctcactagcttcagcaatataccagtcacaaccctcaggcacttctagtatagttaagcctgaaactaatcctccttcataatcatagtcagaactctggcacagatgcaccatccagtggtcccatcaagggctcacctaacactgctaggacccacgtgtaatttgcctgtttcaaacccccttaaccttagtcattggttcgcatcaagttgcattcaaggttggatgccatagtctttcctttttgtcgttctttcaacttttttgtctagacagggtttgatgtcaatgcccttcaaaacacaagcaaaccccatcttgataaatttcatgtaaagggaaagaaattgtcgaagttcacttgatatgctcttcctttttgtatcaattagtgggggttagtggaacgtgatggaagcgcttttatagtggggcttggttttttgtagtgggcagtgggaccttctaaaaggttagggtggtgtgtatattttattagtgatgtaactcttagggaatttgaattgcagagctgaaatggataatgattgctttaacaatgctgggtgctgctagtccaccagaaaatgatattgctttttttttttttatttcaggtgtgctctagttagttatttaaaagtactttcgaccccttttttctcatgcagggagagatggaaggagagtatggtgctattttaaacca

SEQ ID NO: 352 - DNA, 1497 bp, Gossypium raimondii
ttcctttgtttttctttctctcacttcccgtttctctttcagaaaaaggaaagttcaagctaagctaaaactctgaactttccccttctcagtctcctcagggacagagaaagattaaacgaaaggaaaagaaaaagacttcttctttttttccctaaaagaaaagttgatctttttttgtttggttcgattctctttagccatttcctttttgcatgtagatgctctttggtagccttaactcgccacttcgactcacttcaatccatggctaataaccccaacgagtcccccgctgacgatttcctcgagcaaatcctcggactctcccactttgcgcctactgagactggcttagcggggcccgacggtagattgtctggaaacgccacgacggctggagcgccaatgcttctgcagctcagctccggcggtggcaccggacacatcggcgctataggcggcggtggaggcggtgcgtttcacggacaggtttttccattgggattgagcttggagcaaggaaaaggtgggtttttgaagcccgaggaagcatccggtagcagcaagcgcttccgcaacgaggtcgttgatggcagagctttttctgttaaaaacgttttccatggacaaccagtgccagctactgttgctgctggaccacatccaccagcaatgcgtccgagggtgagggctagacgaggacaggccacagatccacatagcattgctgagcggttgcgcagggagagaattgccgaaagaatccgggcattgcaggaacttgttcctagtgttaacaagactgatagagcagcaatgcttgatgaaattgtagattatgtgaagttcctgaggctccaagttaaggtcttgagcatgagtaggttgggcgcagctggtgcagtggcaccactcgtaacggacctcccactatcgtcagttgaggatgaaagtggcgagggaggaagaagccaaccagcctgggagaaatggtcaaatgatggcacagagagacaagtagctaagctgatggaagaagatgtcggagctgccatgcaattccttcaatcaaaggctctttgcgtcatgccaatttcactggccactgcaatttaccacacgcaatctccggatacctcctctgttgttaagccggaaacaaatcctccttcatagacacctcacatgagaaaaagaggaaaagaaaacggtgtatcatatggtgggggagactgtggacaaagacggaagcacttttcttgtgtagtgatggggcatggatttttgggtttggtgggatgtgggacccgcaaaaggagatggatgagatgagtatatttacatattataacaataaaatattacaatattgatagtgttagtgtaagtaacagtgtaatttcacagggaagggctaaagtagaagaagggataatggttggctgattttataaaatgctgattgaataaaatagatggattggttcacgtttc

SEQ ID NO: 353 - DNA, 1301 bp, Helianthus petiolaris
cggggatctcatcttttcactcttcttccctctctctctctctcttctttctctctctaggttttaggattcgccggcgatacgcttctccggcaggcatgtcgactgacccgccggagggctacggtgacgactttctcgaacaaattctcgcgattccgtcgtacaacatcaccggatgcttacctgttaataccgctgattctactggctctgaaacagtttccgttcatcatcaacaacaacaaccgcaacaacaactgcaaccgcaaaagtttccgttaggtttgagtttagataacggccgtgaaacaatcggaggagcgtttgcaggacagcaacagcaactgcagcagcagcagcagcgtgagagaggagggagcatgaatatgagtggtttgtttcctcagtttgagaatttgcagtcacactcgctgttacatactgttccacagggttttcaagggcagccaactagcagtacagcagtgactgtgcctcatccgcctacgattcgccctagggtacgagctcgacgaggacaagctacagatcctcatagcatagctgagcgtctacgccgagaaagaattgcagaaagaatgagggctttgcaggagcttgttcccagctgcaacaagactgataaggctgctatgcttgacgagattctggattatgtgaagttcttacgactccaggtcaaggttcttagcatgagtaggctgggtggagctggtgcagtggcacagctcgtatctgatgtcccgttgcaatctgttgagggggacgggagtgaaaatggatataataatcaacagcagggccaggcagcgtgggagaattggtcaaacgacgacacagaacgtgaagtagcaaagctgatggaagaggatgttggggcggccatgcaattcctgcagtcaaaagcattatgcatcatgcccatttcacttgcttcactaatctaccctaatcaccaacctgatgttaaacccgagccatctgctccttcttagagagcatcttacatgcttctctcttataacaactactactactactacctttttctgtcatttggttttgtgccccaaccccaacccgatgtcttctctaattgatggacattttgtatgaggaaagtaggaaggaaacaggggatgtgtatggccatctcattgtgtcctggggattttatttattatctagattaaaatgtattctaagaaaatctcttcacatggacaaccctacccaacttagctgtgtttattattgttaatatctaaatgatttgg

SEQ ID NO: 354 - DNA, 713 bp, Hordeum vulgare
cgggcaggcgaccgatccccacagcatcgcagagaggctaagaagagagaggatagcggaaaggatgagggccctacaggaattggtccccaatacgaacaagactgatagggcagttatgctagatgagatcctggattatgtgaaattccttaggcttcaagtaaaggttttaagcatgagcagattgggtggtgctggtgctgttgcacagcttgtttctgacattccactttcagttaagggggaagcaagcgatagtgggggcaaacagcagatatgggaaaagtggtcaacggatggcacggagaaacaggttgcgaagctgatggacgaggacatcggtgctgcaatgcaatttctccaatccaaggcgctctgcatgatgccagtctctcttgccatggctatctatgacacacaacattcacaggacggccaaccagtgaagcctgaacccaacaacactgcctagtatagtaacagcagctgcaagccgcatccctgcagctgctagtaggcatgcatgaacctaccatcaaagtgttaagatgaaaactgctggttttgatccactaacaacaaggaggcaggaaaagacctaaaagatcctctccactggaagttgtatcgacggtatatgatgtcacctactaccccttttccatcttttgttcaaaggtgctttaattttcaaggatatggtaagcaat

SEQ ID NO: 355 - DNA, 934 bp, Lactuca perennis
tttcaccctcctcatacgcccactacgcttcttccttctaaaccagactacgattctccggcatggcgacagacccgccggagggctacggagacgacttccttgaacaaattctcgcgattccttcttacaacatcgccggatgcttgcctggtaataccaccgatgctaatgcttctgaaacggtgtctgttcatcgtcaacagcaacagcagcaaccggtttttccgttaggtttgagtcttgataatggccgtgaaacaatcggagcgtttgcagggcagcagcagcagagggagagaggagggagtatgaacatgactggattgtttccttcatttgaaaatttgcagtcacattcgctgcttcattctgttcctcaggcttttcaagggcaatcaactaccagtacagctgtcactgttccccatccaccttctattcgccctagggtccgggcccgcagaggacaagccacagatcctcatagcatagctgagcgtctacgccgagaaagaattgcagaaagaatgcgggctttgcaggaacttgttcctagctgcaacaagacggataaggctgcaatgcttgatgaaattcttgattatgttaagttcttacggcttcaggtcaaggttcttagcatgagtaggctgggtggagctggtgcagtggcacaactcgtatctgacgtccccttacaatccgtggagggggacacgagtgaaaacggatataatcaacccgcatgggaaaactggtcaaacgatgacacagaacgtgaagtagcaaagctcatggaagaaagatgtgggggccgctatgcaatttctccaatcaaaagctctatgcatcatgcccatatcacttgcttcactaatttacccgccccaaacacccgactccaattcccatgttaagcccgaaactgtcg

SEQ ID NO: 356 - DNA, 948 bp, Nicotinana benthamiana
tagccggagataatctccggcatggcgacaaaccaaccggagggctatgccgacgatttcctcgagcaaattctcgcgattccttcctacgctggcttgccgccggtggctgacgtgggaacttcatcagaaacgacgtcgttcacttcggcatctgctgctggtctacagcaaccgttgttcccgctgggactaagcttggaaaacggccgtgatgacgtcagcgatgctggtgcttatgcagtgaagcatgaaagagaaggaataaatatcgggaatttatatgcgggtctagaacatttgcaatctcatgcggttcgtcacgctgtgcctcctgttcaccatatccagtctttccaaggccaaccaacaacaagcacaacgatgactgtaccgcactcaccagcaattcgtcctagggttcgagctcggaggggacaagccacagatccacatagcatagctgagaggttgagaagagagaggatatcagaaagaataaaggctttgcaagaacttgtccccagctgcaataagacagatagggctgctatgcttgatgagattctggactatgtgaagttcctaaggcttcaagttaaggtattgagcatgagtaggctgggaggagccagtgcagtggcacaacttgttgctgacattccgttgcaatctatggagggggacagtgctgaaagtaaatccaaccagcatatctgggaaaagtggtccaatgttgacacagaacaagaggttgctaagctcatggaggaagatgttggtgcagccatgcaataccttcagtccaaatcactctgcatcatgcccatatcacttgctgcacttatctatcctactcagcaaccggatgacatgtccatggtcaagccggaaccggcagccccgtcatagacctccaatttattgcacgtgcctctgagaactcct

SEQ ID NO: 357 - DNA, 1792 bp, Nicotinana benthamiana
cttctttatttctctcttctccacaaaatcatctatttctaaattgagtcatatacttgcacagaagttactaaagatataatgcaagccatgaaccagtacgatccgacgtcgtctcacgacgatttcctcgaccaaattctctcttccgttccttcttcttcactttgttggcctgacctttccaaatcctgggacccacaccaccaccacctctctccgccgctgcctcctaaccctagctccggcgatgaccaccagcttcctccttctaatcctcttcagcatttccaatatgacgaccagtcttcttctttccttgctgccaagctccgccagcaccagatcactggtggtggtggtggcggcggcgatgctgtagcagctgctaaagcacttttgctccagcagcaacttttgctttctagaacactagccggaaacggccttaggtctccgactggagcctccggcgataacggcttcctgaacatgctcggtaatggtgaccaaaacgacagcgtcggaaatccggctaatgacagttccgttcaagctcttttcaacggattcactggatctcttggtcaaaactcaagtcaacctcaacattttctccatcctcagggaggaaggatgcaagcgcagagtttcggagctccggcaacggcgccggcgatgaatcaaactccggcagcaagtggttcagctggtggaggtacaacgccggcggcacagccaaagcaacagcgagtgagagctcgtagaggacaagcaactgatcctcacagtattgctgaacgattacgtagagagagaattgcagagagaatgaaggctttgcaggagctggtacccaatgccaataagacggacaaggcttcaatgctggatgagatcatcgactatgtcaaattcctacagctccaagtcaaagttctgagtatgagcagattgggtggtgctgcagctgttgctcccctagttgctgatatgtcctctgagggaagaggagaaggaaatggaggaaggggaggaaacggaacggcgtcgtcttcaaacaatgacagtatgacggtaacggagcaccaggtggctaaactaatggaggaggatatgggttcagcaatgcaatatctacaagggaaaggcttatgcctaatgccaatttccttagctacagctatttcaactgccacgtgtcactccaggaatcccatgatccctaacggcaacggtggcaacaacccactactaggcggaggaggaggcctcgccaccaacggcggtggtggcgaggctggtggaccatcctctcctaagttgtcggttttgactgtccagtcagccacgattggtaacggtggaattgatccctccgttaaagacgctacttctgtttttgaagcttaagaagtttgtttggaagttttttaacggcgttaactgtttcactgaccccctttgccacggagaaaaaagaaaatgtgaaaaatagtgcgtggccgtcaaagttaagtctaccaaaataagggtcttttagtctttatttttatcttttttccagtttcatatgaaaaaaaaaaaagaagaagagagaaccaagaacgacgccgtatttaggtagacttggctgaagtaagcttaacttaagctaacagcaggaaatgccaatggaaatgaagtacttatgtttcttttaatcttttctccataatgatgatcctttgatttccctgttctacttaagtttttccttaatggagtattgtttggaaaggatatatatata

SEQ ID NO: 358 - DNA, 1484 bp, Nicotinana benthamiana
gatctctcattcattaacggggaaaagaaatgcaagctatgaactcacaaatgtcactacaagaagaaaatggagcttcgtcgggccaaaatatgagtcactctcattttgacccgacgtcgtctcacgatgactttcttcaacagattctctcttccgttccttcttcctctccctggccggacctctccagcggcggtgacggtcattttgacgaccagtcaattttcgtagcttccaagctccggcagaatcagatcaccggcggtggtggcggtggcgcagctgctaaagcgttgatgcttcaacagcagcttttgctttctagaggattactcgccggtaatggtgaccaaaatgatgacgttggaaatccggaaaatgagatttcagttcaagctctttacaatggattcgctggatctcttggtcaaacctctaatcaacctcagcattttcaccatgctcagggaggatccatgcaagcgcagagtttcggagcaccggcgtcgtcgacaatgaatcaaacgccggcggcgagtggtggttcagctggtggagggcagccaaagcaacagaaagttagggctcggagaggacaagcaactgaccctcacagcattgctgaaagattacggagagaaagaattgctgagagaatgaagtcgttgcaggagttggtacccaatgctaataagacagacaaggcttcaatgttagatgagatcatcgactatgtcagattcctccagcttcaagtcaaagttctgagtatgagtagattgggtggtgctgcagctgttgctcccctagttgctgatcggtcctctgaggggggaggaggtgattgtgcacaagcaaatggaggagggaggggcagtaatggaacgacgtcgttagctaacaatgacagcatgacgatgacggaacaccaggtggcaaagctaatggaggaggatatgggatcagccatgcaatacttacaaggaaaaggcttatgtcttatgccaatttctttagccacagctatttccaccgccacgtgtcactccatgaaactcaacaacccactactacacggcggcggaagcggaggctctgccgccatcaacggcggtggtggtggaccatcctctcctagcttgtcggcttccactgtccagtcagccacgatgggtaacgggggcgcttgagtttgttgaaatatacttcgtaatttacgacgttgactgtttcaattatcttttcttagaaaaataccggaaaaatgtgaaaaaagtggtgaaaatttcgttattttagagctgaaatttcaaggccttttcacatgggacaaaaaagaaaaagaaaagaaaaaaggggtaattgaaatgtttagctctaaatattattggtaatttctgattttagttcgtgtgatattttattaattgtatttaacattgaattaatgataatatgggtgtttttgtttatttacatat

SEQ ID NO: 359 - DNA, 1500 bp, Nicotinana benthamiana
gaaatatttaaacaattgcttttatttggtaaccctattggacaatatatttattaatcaaagcttttggtgacaccatttgctttttattttcttcatcgctctcactgttctatagaaagtagcagcaaccaaataataaacacatagaaacactcaaaacacacacttccatttcttttcctatatatatacacaagtacactcgtgagtagtactgagtactagtttgtacatctaatattacacatgttaaaaaaacacttactagtaattgcttttctgagaaattaaggtggtcgagaaaaaaaatctgttacagctatggctaacaacccatcagaaggtcctgatgatttctttgaccaaatcttgggattcccagcttataacggagcagaaaccaatttggcgggaagtgatgccggagcaattccgccggcgatgctgctgcagctaaactccggcgatgcgtcgggtcagttttccggaatgggtcttggtgttggactaggtggtggtggtgggttccatcatccatctcagtccggttcttttccattggggttgagtttagagggagggaaaagtggattcatgaagatggatgatgttccggccgtacccggaaggagatttagagatgatgttgttgatagcagagcttcttcttctgttaaacctggttttcatggccaaccgatgccttcaatgccacatcccccagcaatacgtccaagggtaagagcaaggcgaggacaagctactgatccacacagcattgcagagaggttacgtagagagaggatagcagaaagaattagagcattgcaagagttggttcccaatgtcaataagaccgatagagccataatgcttgatgaaattgtagattatgtcaagttcctacgcctgcaagtgaaggtgttgagtatgagtaggttgggaggagctgctgcagtggcaccacttgttacagaaattccaatatcatcagtagaggaagagatcagtgaaggtggaaataatcaaccagcctgggaaaagtggtcaagtgatggtacagaaaggcaagtggccaaacttatggaagaaaatgttggttctgcaatgcaatttcttcagtctaaggcactctgtattatgcctatttctcttgcatcagcaatttaccactctcaaccaccagatacatcaagtcttattaagccagaaactaatcctccttcttagagatccttattagaaagctggctcggacatcacgtttaattttttttaaaaagaaaaagatccttattaaaaaggtgacaacatgcaaatgaccctgagaattttctttgggagtggatggtcccacagctatttttacttattaagtagtactatttagctttgttgaaagacacggttcaatgttatgtataaagtaacctttttttttgtgattgatatgatatataattcaagcagaagaagaaaaattgtcaaagttctgcc

SEQ ID NO: 360 - DNA, 1451 bp, Nicotiana tabacum
aaaacagagtcattccattccatttccgttcctcaaaaccctttattaacttcttctcgccgggaaaaacccttttcctcgccggagataatctccggcatggcgacaaaccaaccggggggctatgccgacgatttcctcgagcaaattctcgcgattccttcctacgctggcttgccgccagtagctgacgtcggaacttcatcagaaacgacgtcgttcacttcgtcatctgttgctgctgctggtctacagcaaccgttgttcccgttgggactaagcttggataacggccgtgatgacgtcagcgatgctggtgcttatgctgtgaagcatgaaagagaaggaataaatatcgggaatttatatgcaggtctagaacatttgcaatctcatgcagttcgtcacgctgtgcctcctgttcaccatatccagcctttccaaggccaaccaacaacaagcacaacagtaactgtaccgcacccaccagcaattcgtcctagggttcgagctcggaggggacaagccacagatccacatagcatagctgagaggttgagaagagagaggatatcagaaagaataaaggctttgcaagaacttgtccccagctgcaataagaccgatagggccgcaatgcttgatgagattctggactatgtgaagttcttaaggcttcaagttaaggtattgagcatgagtaggctgggaggagccagtgcagtggcacaactggttgctgacattccgttgcaatctgtggagggggacagtgccgaaagtagatccaaccagcatatctgggaaaagtggtccaatgtcgacacagaacaagaggtcgctaagctcatggaggaagatgttggagcagccatgcaataccttcagtccaaatcactctgcatcatgcccatatcacttgctgcacttatctatcctactcagcaaccggatgacccgtcaatggtcaagccggaaccggcagccccgtcatagacctccaatttgttgcacgtgcctctgagaactcctaatagccttgtgtcttaccctcctttgtatccttacctactatcacttgtattttcctctgcaattggtggcaatgcaatcaatgtcagatgccacaatttttgcttttagcccaaccattggccccttttattacctttccggagttttcgtcaaacaaggcatgatgtcataccttgggcaaaggtaaacgtctgaaagcacccaatccattatcatcattttggatgaggtgagcagctttttcaaagttatctatgattagctgctcttctgccattttgtttgtgggatagtggggactcctttatcttttgcatagtggattggtggggcgatgtaaaagtaatcaactggttgttgtaaagtgtaatgtaatttaagtatattattgcaatggatagttgatgtggctctcc

SEQ ID NO: 361 - DNA, 2056 bp, Oryza sativa
gacgcgagtcgagagacgggagagcagtgcagtgcagtgcagtgccgcctcgtcttccttccctccctcctcatactctctctcctcccggtcttctcctcccccgcccaaagcggagcgcggcggttatatatatatatatatatacagcacttcctcctccttcctcgccgcacgtcgccctccgacttcgcctcgtcagccgtcgtcaccgcccccacccgtggattgcaccggagatcggaatgggcggcttcgcctaccccttcacgccgtcgccggcgtggtcgcgggacgccgtgttcgctggctcgccgtgggccgcaggcggcgtctcctccctcgccgacgctttggtgagctacggtgccgtcgacgacgaggaggccgcgttcctcggcaagaccgccgcgtcgtctcccagtacggcgaggctgcacgagcagcagcagctgctgctggaggctgagctgctgcgccacggcgacggcctcggcttcgccgcgatggacgacgacggcggcgccgcgatgctcggcgcgctggagccgtgcgccatgccgctcaccgacagcggcggccccccggtcatctgcagcagcagctccaacgacagcagcgggagcgagcactccgccgccatgcctgcaggaggcggcttcctcgtcggagagcagcagcagcacgtgccgccggcggcctacgccgcgggaggtgtactcccgtccatggccgcgggagaagaaacgccgcagagcttcggctttggcagcctcttcaatggcgatctcctgcaggaggcgaccgtgagcaagtatcatcatcatcagcagcagcagcagctgggcgttgtgccttcgtcgcagccgcatcatctgaatgatgacatcgatttcaacactggaaaattgatgtcttttgcttctggacagcagcacgttacccccagcattgacagcctgcagatcgaccagaaggaattcagcagtggcctgcaccacctcaatctctcctcgctgatttctggaccactcgcatcattcaatgcaacacagagccatagacagcctgctgaagcttgcggtggcaaaaatggcggcgccgctccatttgtgaacctatctgaggtgctaccaaagggcaatgggagtggtagtgctgggaatggagcacccaagcctcgtgtcagggctcgccgaggccaggccaccgatccccacagcatcgcagagaggctccggagggagaagatctctgacaggatgaaggatttacaggagcttgtcccaaactcaaacaagactaacaaggcatccatgctcgatgagatcatcgactatgtgaaatttctccaattacaagtcaaggtccttagcatgagcaggcttggagcggccgaagccgttgtccctcttctgacagaaacacaaaccgagagccccgggtttctcctgtccccaagatcatcatcaggagaaaggcaggcaggagcaggagcagtaacaggagggctccccggcgatcagccggagctcctggacggcggcgccatgttcgagcaggaggtggtgaagctgatggaggacaacatgacgacggcgatgcagtacctgcagagcaaggggctctgcctcatgccggtggcgctggcgtcggcgatatcggcacagaaggggacgtcctcggccgccgtccgaccggagaagaagaagaacggtgatggcgatggcggcggcgacgaggaggacgtgaagggagagtttgacgcaccgaggaggcctcctgtcggccggccgaaggagatgaggtccagagtctaagctagaacctctgctttgttcaggagagatggagcttaatttagatcctaacactttgctacttatatgtttattattatgaaattttaattgcaagttgcaactggtgatctcgaactacattttgccggtgattagaaaattgttatatggaggttagttattaaatcatatataattatattttgtattgttgcggtccttgcggacaatgccattcagtaccttgatatttg

SEQ ID NO: 362 - DNA, 1326 bp, Oryza sativa
atgcaacccaacgcccgccaaatgcgcggcggcggcggcggcggcggcggcgggcaggacgacttcttcgaccagatgctgtccacgctgccggcggtgtggtccgagctcggctccggcaagcccgcctgggacctcacggccggcgccgtaggaggaggaggaggagcctccgatgaccactccgccgcggcgttcgacgactccgcgctcctcgcctcccgcctccgccagcaccagatcgacggtggaggcgacaagcccatcatgctccaactcagcgacctccaccgtcatcacggcctcgccgccggcgatgacagcggcggcgctgccgggttccttcccctgtcgctgttcgctgaccggtcgcaggacgacatcgacgccgccttcaagtcccccaatggcgctagaggtgaccatgcgctgtacaatgggttcggggccgccggaatgcatggcgccgccgccatgcagccgccgccgttcgggcagggaggatcaatgccggcgcagagcttcggtggcggagcggccgcgagcggcggcggcggcggcgggtcggcgtcggcggcagcggcggctggggcatcgtcgggcggaggggcggcggcgccgccgcggcagcggcagcgggcgaggagagggcaagccactgacccacacagcatcgccgaacgtctccggagggagaggatagctgagaggatgaaggcgttgcaggagctggtcccaaatgccaacaagaccgacaaggcatcgatgctcgacgagatcattgattatgtgaagttcctccagctccaagtcaaggttctcagcatgagcagattggggggagcttctgcagtcgcgcctctagtggctaacatgtcatcagagagtaatgggaatggcaatgccaccagcagcagcgggaacggcgaggcggccaatggcagcagcaacggcgacaacaatggtggcggcacactgcgggtgacggagcagcaggtggcgaagctgatggaggaggacatgggctccgccatgcagtacctgcaggggaaggggctatgcctgatgccgatctctctcgcaacggccatctcctccgccacctcctcgtcgctcctcccccgcactgggggaggcgctggagggtccctacatgaaggtggtaatggtacatcaccaccattggtgaatggcaccgccaccggatgtgacgacgccggagtattcttttctgttaaatttgtcgtggagctgtcgtttctcctgctgaatgaagactgtagaggtaaggaggaatcgaaattattggtccagaagggaccctga

SEQ ID NO: 363 - DNA, 1831 bp, Oryza sativa
acctcgcttcacactagccgaggagacgcgagcgcgagctgctctcctctcctcccgccccgcgtcgccgacgtcgaggcggcggtcgacgtcgacgtcgccggggatggccgggcagcagccgcagcagcagggcccaccggaggacgactttttcgaccagttcttctccctgaccagctccttccctggcgccgcgccgggcggccgcgccgccggtgaccagcccttctccctcgcgctcagcctcgacgccgccgcggcggccgaggcgtccgggagcgggaagaggctcggggtcggcgatgacgccgagggtggcggcagcaaggcggatcgggagaccgtgcagctcaccggactcttcccgccggtgttcggcggcggcggcgtgcagccgccgaacctccgccccaccccgcctacccaggtgttccacccgcagcagtcgaagcagggcggagcagccgtcgggccgcagccgccggcgccgaggccgaaggtgcgagcgcggcgtgggcaggcgaccgacccccacagcatcgcggagaggctaagaagagagagaatagcagaaaggatgagggccctacaggaattggtccccaatacaaacaagacagatagggcagctatgctagatgagatccttgattatgtgaaattcctgaggctgcaagtaaaggttttaagcatgagcaggctgggtggcgcgggtgctgttgcacagctggttgctgatattccactttcagttaagggggaagcaagcgatagtgggggcaaccaacagatttgggaaaagtggtcaacggatggcacagaaagacaggtagcgaagctgatggaagaagacatcggggcagcgatgcaatttctccaatccaaagcactctgcatgatgccaatctcgctcgccatggcaatctatgacacacaacaaacacaggatggacaaccagtgaagcacgaacccaacactccttcctagtatagtaatagcaactgtaagtctgtaacatgaatcgttacaacccctagtagacatcaacctatcaaagtgtaagataaaacagctcgttttgattcactaacaaggaggcaggaaaagacctaagagatcctctccacttgaagttgtaccaatggtatatgatgtcacctttcgttatcatcttttgttcaaaggtgctttgattgcaaggatatggtaagcaatagcctgctcatcctcctacacctttcaatgcccctatgagcgcgggtgattgagagagctactaaagagtctggcatgctctcacattgtctcttttcgagtctgtagtgcaccaaccatacactttgtggtggggactgcttttttggtagtgggtgtttggactaatcaaaagggattgatgtatgcctgtgtctgcagcctgcacaatggttgacggaatttgaacacaagatgaaatggaagatgattttgatggtgatgttcatttatctccatttttccaaagtggaggcggaggctttggtcaatggaggctgagcgtgcgctaagctgatcgctagtgggtctgctatctacatctacatgcactactgttgtatctattgtgacatactcttgataagaaactgcggtataaagtttaatctttctattggcgattaatccatagaattactttgtattttctgccatgagttctcaactacccacattatttgtgaagaacagctgttcttgtactgttcactgccctctaccacagggtttcctgagtttgtggacaaattgtgagaatctacagcaaggactattgagtttttttttgtc

SEQ ID NO: 364 - DNA, 1104 bp, Oryza sativa
atgcagccgagcagccgcgacacggtcgccggcggcggcggcgaggggacgcaggatgacttcttcgaccagatgctctccacgctgccgtcggcgtgggccgacctggggggcggcggcggcggcgcggcggggaagtcgccgtgggaggtcgatccggcagcggcggcggcggcgtcgcaggtgttcgacgagtcggcgctgctcgcgtcccgcctccggcatcaccagatcggtggggctggcggcggcgggggagagaagccggtgatgctgcagctgagcgagctgcaccggcaggccggcggcggcgaggaggacgggagcggcgcgttctcgccgctgccgctgttcacggaccggacgaacgtgccgccgcgggaggagatggagggcggcttcaagtcgcccaatgccgccgccggaggcgagcacgcgctgttcaacgggttcggcgtgcacggcggcagcggcggcgccgggcagccgccgttcggccagcttcggagggagaggatagcggagcggatgaaatcgctgcaggagctagtcccaaacgccaacaagacggacaaggcgtcgatgctggacgagatcatcgactacgtcaagttcctgcagctccaagtcaaggttctcagcatgagccggctcggcggcgccgccggcatggcgccgctggtggcgagcatgtcgtcggaggggaacagcaacgggagcagcaatggcggcggtggcaaggcgagcaagggcggcaccggcggcgagggcggcggcggcggcggaggaggaggaggaggtggcaccggtggtgggatgcgggtgacggagcagcaggtggcgaagatgatggaggaggacatgggcacggcgatgcagtacctgcaggggaaggggctctgtctgatgccgatctccctcgcctccgccatctcgtcggcgacctcatcggcgtcgctcctctcccgcccgtccatccgccacgccggcgcgccgccgcagacgatgctcgatgccgccggcccgacctcgccggcggcgatgtctaacggcgatgacccacggcacgcaaaggcggacggcggcgccggcgggacgcaatga

SEQ ID NO: 365 - DNA, 2221 bp, Oryza sativa
agaaggggtgtactagtaaacaaaacaaaaagaataggttgagactttcctgctatcgtcagcattttcagcccccctcccctgggctggctctgcatcatcattcatcatcagcagcagtcagtccatccaacgcgtcttcagtcctcacccgcagcaagaaagccacacttttcctcctcctcctcctcctcctcctccgcctcttcctcttcctcccccttcgttctccacacccactctcgggctgcggcttctccggcttccgcgcctcttcctctgtcgggttaacaaagttactttcagcgtcagagggtatttcgtacaaaaaggaactgctgttggtacaggattatcagctgtgaacactttctgtttctagaggccattctctgtaacactttggagcatcaattttgtagcgtgctatcatggactactctgctggttcctacatgtggcctggcaattcaggttctgagaactataattttgttgacggttcgtcggaatcatatgcagaagaaggaagcctaccaccttcaggctatttcatgggagctggatcagatcgcagtttaaagatcacggagaatgaaaggaaccccactatgcttgcaaatggatgcttgccatacaacacccaggctcatccattatctggccagattctacctaagggtgagctccctaacaatcttctggatcttcaacagctacagaacagcagcaatctgcgaagcaattcaattcccccaggggttcttcagtgcaattcaacatctggaacatttgatgcgaaattggatacacctggtcttgcagaactgcctcatgctttgtccagttcaattgatagcaatggtagtgacatttctgcttttcttgctgatgtgcatgccgtttcttcagccccgacgttgtgttcagcattccaaaacgtttcctccttcatggaaccagtaaatctagatgctttcggtttccaaggggcacaaaatgttgctatgttgaacaaaacaagtcttccaaatgggaatccctcgctgtttgataatgctgccatagcatcactacatgatagcaaagagtttctcaatggtggttccatcccttcgtttggtactgtcctgcaggcactaggagcgggtggtttgaaggctgctcaacaggagcaaaatatccggaatatacctctccctacattcacatctggtagtcatttggcagttactgatgcacaagggccaccacttccttcaaagataccaccattgatccatgaccataatagtgagtaccctattaaccattcttctgatgtggaaccccaagcaaattcagctcctggaaatagtgccaatgcgaagccacgtacaagggctcgccgtggacaggcaactgatcctcacagtattgctgaacggcttcgccgagagaaaatttcagaaaggatgaaaaatctccaagtccttgtcccaaactccaataaggcagataaggcatcaatgcttgatgaaataattgattatgtgaaatttcttcagcttcaggtcaaggtattgagcatgagcaggctaggagctcctggagcagttcttccccttcttagggaatctcaaaccgagtgccatagtaatccatctctatcagcttcaaccatttcacaagggccaccagacatgccagactcagaagacagctctgcctttgagcaagaggtagtgaagctgatggaaacgagcatcatcagcgcgatgcagtatcttcagaacaagggtctctgcctgatgcccattgctctcgcttcggccatatccaaccagaaaggcatggctgctgctgctgcaatccctcctgaaaaatgaaaaaaaaaatgaaatcggaaaaatatggggggaacaactgcagaagacataataactcaacggctgcagaaatgtgctggacactgcaggttttgtgaatgaagtgaaatccaatccagggggtcataaaacataggaagttatctgactaattcaggcttatgacacaatctactctatagtctatagctattgtgtgcctgttgcacatcagttgatgtgtattcttttgttttttttgtattgcatccggatgctaattaggtagtagtgtttcctttgatgtacatgagtattatctatgcggttttatctaatgtgcatataaagtaaaatctggtatgttgctgcta

SEQ ID NO: 366 - DNA, 1500 bp, Oryza sativa
atggctgcggcggcggcggcgggccagatctccctggacgacctccgcaacggcggcggggtcgccgccaatgccggcggcggcggcggcgtccacgacgacttcctcgaccagatgctcagcagcctgccgccctcggcgtggcccgacctcgccgccgggaaggcggccgaggacgacgccgaggggatgcatcaccaccaccaccagcagcagcagcagtttggtgggccgtacgacgagtcggcgatgctggcgtcgcggctccggcagcaccagatcagcggcggcggaggaggaggcggcggtggcgcggccgccgtgaagcagatggtgctgcagcagctcgccgatctgaggcaggggcaccacatgatgctccagggcttggggggacggtcgccggcggggggcggcggcggcggcggcgacgggggccttctcctcccgctcaccctcggcagcggcggatcgggcggcgacgtgcaggcgttgctcaaggccgccgcggccaattccgccggaggaggagacgccggcggcgtctacggcggcggattcgccggctcgctccatcaacagcagcaacatttccagccacatccacagacggcgccgacgattccgacgcagagcttcggcggcggcggcggcggaggaggaggaggaaccgcgtcaggcggcggggcggcgcagcctcaggccggcgcggctggaggaggcgcgccggcgccgccgcggcagcgggtgcgggcacggcgaggccaggccaccgacccccacagcatcgccgagcggcttcggagggagaggatcgccgagaggatgaaggcactgcaagaactggttcccaacgccaacaagttgatgcagacggacaaggcttccatgctggacgagatcatcgactacgtcaagttcctacaactccaagtcaaggcaagcacgtacactaaattactaatacatgttttgagcatgagccggttaggtggcgccgcagccgtcgcgccgctcgtggccgacatgtcctcggaggggcgaggcggcggcgcggcgaacggcggagcaccggcggcggcggggagcgatagcctgacggtgacggagcagcaggtggccaagctgatggaggaggacatgggcaccgccatgcagtacctgcaggggaagggcctctgcctcatgccgatctccctcgcgtccgccatctcctcggcgacgtgccatctccggccgccggtggtcgccgccgcgcagcagttcccggccgggctcggcgccgccgctgccgccgcgcaccaccaccaactgagcgcggcggcggcggcggcggccatgcgcggacacctgcccggcctgaacgccgacggctccgtgccggcctcgccgagcatgtcggtgctcacggcgcagtcggccatggccaacggcggcgggggcgccgccgacggcgaggggtcgcagctcaaggacgccgcctccgtctccaagccgtga

SEQ ID NO: 367 - DNA, 411 bp, Oryza sativa
atgagggccctgcaggacttggtccccaacacaaacaagacagacagggcagctatgctagacgaaatccttgattatgtgaagtttcttcggcttcaagtaaaggttctgagtatgagcaggctgggtggtgctggtgcagttgcgcagctggttgctgatattccaatctcagttaagggggaggcaagtgacagtgggagcaaacaacagatttgggaaaagtggtcaaccgatggcacagaaaagcaggtagcgaagctgatggaagaagacatcggagcagcaatgcaattcctccaatccaaagcactatgcatgatgccaatctctcttgcgatggcgatctatgacacacagcattcgcaggacggacactcagtgaagcctgaacccaacactccttcatag

SEQ ID NO: 368 - DNA, 913 bp, Picea abies
  misc_feature (804)..(809): n is a, c, g, or t
  misc_feature (858)..(862): n is a, c, g, or t
  misc_feature (875)..(882): n is a, c, g, or t
  misc_feature (886)..(893): n is a, c, g, or t
cacaggaggcagctgtaacggcagcgacggaggaatgcttcctcttcctctcagtcttggtcaggctggaaagtccggcgacatgaacgagcccggatcgcgggaagaaattgaagcttctttcaagtcggtaaataatgcccgagattcgaacctcggagggctattccagccgttcgccgtatcaccgcggggcgttcgaccgaccggtcaaaacttccatgcgcagcccggacaagtgccattgcaagggtatggtggaatgccccaacctcagcatcagaatccacctccgaccggagttggtgctgcaccacctgttcgacctagagtaagggcacgccgtggacaggctacagatccccacagtattgcagaacgattgcgtagggagaggattgcagagagaatgaaggctctgcaagaactggttcctaattccaataagacggataaggcttctatgctggatgaaataattgattacgtcaagtttcttcagctgcaagtgaaggttctaagcatgagtcgactgggaggtgcaggagcagttgctccccttgtggctgatatacctgctgagggtgccaacgccccacaaggcacaagaaccaacggtagccagaactcttctccggacggtctagcattaacagaacgccaagtagcaaagctaatggaagaagacatgggaacggccatgcagtatcttcagggaaaaggtctctgtctgatgcctatatctctggcctctgccattaataactccggttcgagaccccaggctccttccaccccttctcnnnnnngactattggcatctaatgttaacgacaggcaggtactcgaaccctcctnnnnntcggcactatctnnnnnnnnctcnnnnnnnnatgacatacagccatccatc

SEQ ID NO: 369 - DNA, 1266 bp, Populus deltoides
attacggccggggggtactcctcactagtcactggctacctgtgctcgtattagaaagcaaaccaaagcaaagcgaaaagctgaaaccttgaaagccgaagtacttagctataaagaaaaagagaaaaagaaagaaagaagaaggtaacccaacagtccttaactctctcaattaaaacgattttgcatgtaaattgatgctattttgtatccccaactctctatctcaactcacttcgactcctccgagtccaactccaaatggccaataatccaaccgaacctccagccgacgatttcctccaggaaatcctcgggatgcctaactttgcttcggctgaagccgggttggttggagccgatgctggcctggctggcgccgctgctgctcaagcttctatgatgcttcagcttagctctggtgatggttccggccacatctccgaccttggcggtgctcctggaggaggaagcgccgggtttcacggctttcccttggggcttagcttggagcaagggaagggagggtttctgaagcccgaggaggcgtctgggagtggaaaaaggttccgtgatgagattgttgatggtagagcgaaaaatgtttttcatggtcaaccaatgccgacaacggttgctatagcaccgcatccaccagcaatgcgcccaagggtacgggctagacgaggtcaagccacagatccacacagtattgctgaacggttgcgcagagaaagaatagccgaaagaatcagggcattgcaggagctggttcctagtgtcaacaagacggatcgagccaccatgcttgatgaaattgtggattatgtgaagtttttaaggcttcaagtaaaggtattaagcatgagtagactgggcggagctggtgctgtcgcaccacttgtaacagacatcccactatcatcagttgaggatgaaactggcgaaggaggaagaaaccagccagcttgggagaagtggtcgaatgatggcactgaacggcaggtagctaagctaatggaggaaaatgttggcgctgccatgcaatttcttcaatcgaaggctctttgcatcatgcccatctcactagcgacggccatttaccatacacaaccaccagataccactagtattgtcaagccagaaacaaatccccaatcatagaaccgttgaaaggtgggggagcatcccatggtcctgtctaaaagagtaaagtccaaatgcttagggtcccacgtcttatttgtcacgtttcacccccacaat

SEQ ID NO: 370 - DNA, 1853 bp, Pinus radiata
gttgcaaagcaatacccagaaattattcacaatgtcattgctgcctcccgggataggaggccagggcttgaactctcaggagaacgacccgtatccgtacgacgattcccagttcctagctaacaggctaaggcagcatcaactgagcggtaattcttcgatgaatcagacgccaaaccaggcctcgcaagggattaatgaaaccaatacgtctccgggccgatccatggttttgcagctaagcacaggaagtgcaagcgcttcacagctgctggcctccatgggaaattcgcctcgcggcaccgcggtaatgacgcagtcgcccagtacaggaggcagctgtaatggcagcgacggaggaatgcttcctcttcctctcagtctcggccaggcgggtaaatcaggcgacatcaacgagtcccgctcgcgggatgaaattgaagcttccttcaagtcggcaaatcatgcccgagattcgaacctcggagggctatttccgccgttcgccgcatcaccacggggcgttcgaccgacaggccaaaacttccatacgcagtccggacaagtgccaatgcaagtgtatggtggaatgccccaacctcagcatcagaatccatctccgaccggagttggtgctgcaccacctgttcgacctcgagtaagggcacgccgtggacaggctacagatccccacagtattgcagaaagattgcgtcgggagaggattgcagagagaatgaaggctctgcaagaactggttcctaattccaataagacggataaggcttcgatgctggatgagataattgattacgtcaagtttcttcagctgcaagttaaggttctaagcatgagtcgactgggaggtgcaggagcagttgctccccttgtggctgatatacctgctgagggtgccaacgccccacaaggtacaagaaccaacagtagccagaactcttctccagacggtctagcattaacagaacgccaagtagcaaagctaatggaggaagacatgggatcagccatgcagtatcttcaaggcaaaggtctctgtctgatgcccatatctctggcctcagccattaataactccggtgcgagaccccaggcaccatccaccccttctcttcaagggctattgccacctaatgccaacgacaggcagatactggaaccctcgaactcggcactctctgccctcacgtccacctccatgaccatacagtcttccatcagctcgcctgggagcggaataacggagcaaggtgataatgcacacaaggcagtgaacggaacaaggaatccaaaggattccagagaagccaattccgttacgaagtccaacgggataggaggcccagctctttccaagaacgccgttaaaggagaggacgaacctcaaaggaggacgggccagtaaacagcaccaccttgctaacggaaactgtaccatacttctattaacgccagattgcatgaaattgttcaagcatacgaaatttacttttcacatgcttcaacaatttctaaatagtcgtagtcgcagtcgcagtcgctctatgggagagcattcattcaaaaatcccaaaaacacacttcaaattttcctttctcctgaagtttggtgtttatttttattgaatgggtaaaagaatcgagcaagtctatcaaaataaggcacgcgccccactttgatgatgccttatttaaatagacttgcataaatatgacattatgtatggttgacccaagcgctttgttaatcactacgtaagttatatcttaagttggataataattattgctcatgtcagctacactacgaaattcttgtttatttaaaaaaaaaa

SEQ ID NO: 371 - DNA, 1877 bp, Picea sitchensis
caggtaaaaagaaactttctttttgattcggaataaaattcacacaatgtgtgaaaattccaaaactctcacggtaaacgttttagaatgtaacattgacttgcatgggaaggatgtgaataattaaaaatccttcccacactaaaacccacttgatctttatatgcttaatactaatcccggaagctcttaaaccagaagattgtacaattgaatcttcatactcgaataaaaacaactatttctggttaaacaaaaatcgagaaaagacggacggccatgttacaaccacggcagtttctctcctctggttcttgttagaaagtggtcaattattatgctatttgcagagaactaagattgccaacaaacagctagttcattgtagctgggagatttcagtttaagatgacaggcaaaatcaacattgcaaaaaactccataagagatggctcctaacccacgtcttttcgtatgtgagccaccagtatactttccatatattcgagaatccttgaagttagaagcaaccttttttggcctcggatatcttccctattcctttttcctaagtttcggcaagctagatattatcccaaattctgctccatttgactcagcggtgggaactaattctcttcctctcttttcaactgtgttttcctttaaaaggaaatcactgccaaatccagcagatcccattccaagagcacctgagcaactatcgacagttaatgaagcaggctgattgcctgagctttgcctgtcactagtactgtcaacagaatttgttaccccagaacccaacagtggctttccagttgaactcgatatagcagttgccagtgcaattggcatcaaacaaagccctttattttgcaaatactgcatggctgcagtcatatccttctccatgagcttcacaacattttgctcgaaggctagaccatcctgcgatagtgagccgccagcttgacccagagccgctgatgccaggctgccagatccctcagctggaacatcagcaattagaggcgcaactgcgcctgcaccaccaagcctactcatactcaaaacctttacttgcagttgtagaaatttgacatagtcaatgatttcatccagcatggacgctttgtctgtcttattagcgtttggaacaagctcctgcaaggatttcaaattttttgcaatcctttccctgcgttcccgctcagctatactgtgtggatcagtagcttgactacaaactaatagctccttcaaaagatacggtgtgttttcgccagcaatgacactagaagaactattctgaacatcattattttgagcctggccttctaagttcggactcatatgacttgacggtgttactgacattgttgagactcttgagctcgcttgaagtgttcccatagaatcaccaggcaagcaatttgttggtcctccagcactactatccaaagatgatctgtcggcaccatttatgtcttcccatgaagatgatagtaattgatcaaaaatgtcatccattacagaactcaagagctccactcacttgcaaaacaattgctatgaaattgccctttgtccagcaataaactagctgaaacagccttagctgatagatttcatttcttgttgctctcaaaaatccaaaatcaggctttcccctcagcacctacattaaccgctagcagcagccatgtccgcctataaaatagcagaatttaaccaaagaacgatttctccgtttccaatttagccttctttaatgtcgcggcttggcaaaactgcaaccaacatgtgccggcattgaacgttaacaggagagcagagcagagcagccacattagcataacgttatcagaatttca

SEQ ID NO: 372 - DNA, 1548 bp, Pinus taeda
ttttgggcaaaggtctcactctgaagacaaaatgctagccagagaaaatagatctggagatactgagcatgatgatcttcaagggacccttttgacatcttatacaggaccacaaggaggtcagacagtgctacctagaactccaggggcacaatcccatcaacagaatcttagcacacaaactatacaatcaggtgaaggaacttctctacagcagtatggaaaccattcagctgtttctcagctgcagtctggggctggtggtggcaatgctgcaaatggagctgcaaggccacgtgtcagggcacgtcgaggtcaagctaccgatccacacagtattgctgagcggcttcgcagggagaggattgcagaaaggatgaaatctttacaagaacttgttccaaactctaacaagacagacaaagcatccatgcttgatgagatcatagagtatgtcaagtttttgcagctgcaagtgaaggttttgagcatgagtaggcttgggggtgctggtgcagttgcacctctgattgctgatgttccatctcagggatcaggtggtgtcatgtcaacagccttgggccaagcaagtgggcccttgactctgtcacaggatggtcttgcttttgaacaggaagttgcaagactcatggaatcgaacatgacctcagctatgcaatatttacaaaataaaggactttgtttgatgtccattgcacttgcaacagctatatcaagttcaagtggaaagcctgtactggctactgtgccaggaacaggtgttgatagtagtgagaagcaaaattctgacatgcaatccattgtcttaccttttagtagcagttcaacaaccatgggactcagagctactgcatctggcagtgacgcccctataaatgagaattcaataaataaagctagcatagaaaaagttgtggcagaaaaatcaaatggcatttcacctgggctatcatctgatgtgcccaaggttggatcacagagcagggaagaactcttgaagcgagcacaatgatttctatctgcaagtgtgtctgatttcggtattcaggagtgagcctcaatgctaaggcggttggtgagattttctagtacgcaattttttaacagataggttatataccactgattatggttcacacatctgggatcgtgtgagatttcaataggagcaaaatgtgtaatgtataagtgaacccctgttttaatgagaaatattggtggaactctgttggtgcaaggttgccaacctttttatttccactttccttttaggcaaatttaaggttaccaagtatttattctaacttgaacatgactggtgctgaccatactagggtcctgctactgagataccaagatggctcaggcatccattttcctgtttcccttagttttgatttgtggataagtggatatttatccaaactttaaacaattggatgatcttatttcaatttgcttcaacaaatgttaaatgcaatgttctcaataccaaggtaagtattaccactgggttgttttctgttt

SEQ ID NO: 373 - DNA, 1013 bp, Populus trichocarpa
tcactttgactcctcccagacctactccaaatggccaataacccaaccgaacctccaaccgatgatttcctgcaggaaattcttgggatgcctaattttgcttcagctgaagctggcttggttggagctgacgctggcttggctggcactgcttctgttcaagctcctatgatgcttcagcttagctccggtgatggttccggccacatctccgcactcggcggtgctcctggaggcggaggcgcgggatttcacgggtttccgctggggcttagcttggagcaggggaagggagggtttctgaagcccgaggaggcgtccgggagtgggaatcggttccgtgatgatattgttgatggtagagttagaaatgtttttcatggtcaaccaatgcccacaacagtcactgcagctacacatccaccagcaatgcgcccaagggtacgggctaggcgaggccaggccacagatcctcacagtattgctgaacggttgcgcagagaaagaatagccgaaagaatcagggcattgcaggagctggttcctagcgtgaacaagacggatcgagccgccatgcttgatgaaattgtggattatgtgaagtttttaaggcttcaagtaaagatattaagcatgagtagactgggcggagctggtgctgttgcgccacttgtaacggacatcccactatcaccagttgaggatgaaactggcgaaggcggaagaaaccaactggcgtgggagaagtggtcaaatgatggcactgaaagacaggtagctaagctaatggaggaaaatgttggtgctgccatgcagtttctccaatcaaaggctctttgcatcatgcccatcacactagccactgcaatttaccacacacaaccaccagataccactactattgtgaaaccagaaactaaccccccgtcatagaaccgtggaaaggggggagcatcccgcggtcccgtttaaaagtcaccaaatgcttagggtcccactccttatttgtcccg

SEQ ID NO: 374 - DNA, 1106 bp, Populus trichocarpa
agtagtattttgtgtcatatatttgcatgcatggcaggaaatcccccacctgaagggttaggagatgatttctttgagcagatcttggcagggcagccacctggttatggtggtgaggctgtggggtccaccagcctgcccatgatggggttgcagttagggtctagtgctgctaatgttggattaatgaggagtagtgctaataataatatgggaatgatgcctttagggttaaacttggagcatcatgggtttttaaggcaacaacaagatgatggcagtagttctttagataccaacaacagcaataatatcaataatgcttctcctttttctatcacttctgctggattcttggggagagattctgtacacatgactagcttgttcccaacgtttggacaattgcagattcattcatcaatccggtctgcaccaccaccacttggaccacctcagattcaccagtttaatagccagccaacatcaggagcagtttcagctgtaccacaaccacctggcattcgaccaagggtgcgagcaagacggggccaagctacagatccgcacagtattgctgagaggttgcgaagagtaagaatcacggagagggtgaaggcgttgcaggaattggttcccacttgcaacaagacagatagggcagccatgctggatgaaattgtggattatgtgaagtttcttagactccaagtcaaggttttgagtatgagcagactcggtgcggcgggcgctgtggctcagcttgtagctgatgtaccactgtcatcagttcagggagaaggcattgaaggaggggccaatcagcaagcttgggagaattggtcaaacgatggcactgaacaggaagtagctaagttgatggaagaagatgttggagctgccatgcagctccttcagtccaaggcactctgcatcatgcctgtatcacttgcttcagcaatcttccgagcacgcccaccgaatgctccaacactggtcaagcccgaatcgaaccccccctcataaacctaagcaagaacgtgcaagctttgcatacacatcgatcattccagggggcatctgtttcccaaattaaaaactgctct

SEQ ID NO: 375 - DNA, 1115 bp, Populus trichocarpa
gtagtattttggtgtcatatatttgcatgcatggcaggaaatcctccacctgaagggttgggagatgatttcctcgagcagatcttggcagcgcagccacctggttacggtggtggtggggaggttatggggtccactagcctgcccatgatggggctgcagttagggtcttgtgctggtaatgttggattactgaggagtaatgctaataataacatgggaatgatgcctttagggctgaacttggagcatcatgggtttttaaggcaacagcaagatgatagtggtagttccttagataccaacaacagcaataatatcaataacactcctccttctataaaatctgctcgaatcttggggagagattcggtgcacatgacaagcttgtttccaacatttggacatctgcagattcattcatcaatccggcctacaccacctcctcctggaccacctcaaattcaccagattaatagccatccaaacccaggagcagtttcagctgtaccacaaccgcctggcatacggccaagggtgcgagcaagacggggccaagccacggatccacacagtattgctgagaggctgcgaagagtaagaatcacggagagggtgaaggcgttgcaagaattggttcccacttgcaacaagacagatagggcagccatgcttgatgaaattgtggactatgtgaagtttctaagactccaaatcaaggttctgagcatgagcagactaggtgcagcaggcgctgtggctcagcttgtagccgatgtaccattgtcatcagttcagattaagggagagggcaatgaaggaggagccaatcagcaatcttgggaaaattggtcaaatgatgacactgaacaagaagtagctaagttaatggaagaagacgttggagctgccatgcaattccttcagtcgaaggcactctgcatcatgcccatatcacttgcttcagcaatcttccgagcacgcccacctaacgcatcaacactcatcaacaccgaatcgaacaccccttcataaacctaagcaagaaagtgcatacttcgtgtgctcgtcgatcattccagcaggcatctgggtcccaaatcttgttcttgtcc

SEQ ID NO: 376 - DNA, 1481 bp, Populus trichocarpa
caagacgacaaaaaaaattcacctgtaagcatgataagttcaaatcaaagtgtggagtccttggccactcaagacacttcatctgtagttcttggcagtgagtcagattatgctgttgataaagtcttaatttctgaacaagctcgattgcaaaatgattgccagaattgcaatggaaacccctcccctgatggaatggcacgtggaaacttaaaatttggaaacacaggcctgcaatgcaatggaattcttcctaccctgagttctctgaactatccaaatcagcttccaatagttggtgatttgacatcgtatctctctttttctgaggcaagcaatgctggatgcaatggaagggaacaatctgagtacctgagatccttaaaaaatctgcaaaacttatcatcaatcccacaattgtggccttcacaatcttatgagggtgtttcttctctccctcctttgatgggacaagacagaatagagggatctggtcttcgaggagggaacttggatgatgatatgcatattatggggaagggatacatgggcatggatgaaattctccgacttgataagttatctgcatcacctactacagaggggaaagaagatttgcaaagttgtcctttctcatctggcatagctgagcccaatgtaaacatgtcaatgaatcaattatcatctatgcctcagactacatcagctgctccagtagaaggctgcaatggaactggaaaaactcgtgtaagagcacgacgtggccatgccactgacccacatagtatagctgaaaggcttcgaagagagaaaattgctgaaaggatgaagaatctgcaagaacttgtacctaattccaataaggttgacaaggcatctatgcttgatgagatcatagagtatgtcaaatttcttcagctccaagtcaaggtgctaagcatgagcaggttaggggcagccggagcagtcattcctctcctcacagatggtcaacctgagggtcataatagtttgtcgctctctccatcagctggtctaggaattgatatttctccatctgctgatcagattgcctttgagcaagaagtacttaagctactggaatccgatgtgaccatggccatgcaatatcttcaaagcaaaggtctctgcctcatgcccattgctcttgctgctgccatatccagtgttaaggcatcgttatcaggtacaacttctgaggagaggaagaacaatggctacaccagtggtcttgttagcagcagcagcagcataactggcattgacacccatccaatgtccaatgataacaatattgcaaccggtacacttagcagcaaaggcatgattgtcaatggctgcaatgaggttgtcaagcaagaagtgctgaagaacacttgatgcatttctagagcacggaaagtaaagatgtaatttcattattttagatggggtttcatttttcaagctgaggcagataa

SEQ ID NO: 377 - DNA, 1711 bp, Populus trichocarpa
gggtctctccgctctcagtactcctcactagtcactggctacctgtgctagtattagaaagcaaaccaaagcaaagcgaaaagctgaaaccttgaaagccgaagtacttagctataaagaaaaagaggaaaaagaaagaaagaagaaggtaaccaaacagtccttaactccctcaattaaaacgattttgcatgtaaattgatgctattttgtatccccaactcgctatctcaactcacttcgactcctccgagtccaactccaaatggccaataatccaaccgaacctccaaccgacgatttcctccaggaaatcctcgggatgcctaactttgcttcggctgaagccggtttggttggagccgatgctggcctggctggcgccgctgctgctcaagcttctatgatgctgcagcttagctccggtgatggttccggccacatctccgaccttggcggtgctcctggaggaggaagcgccgggtttcacggctttcccttggggcttagcttggagcaagggaagggagggtttctgaagcccgaggaggcgtctgggagtggaaaaaggttccgtgatgagattgttgatggcagagcgaaaaatgtttttcatggtcaaccaatgcccacaaccgttgctatagcaccgcatccaccagcaatgcgcccaagggtacgggctagacgaggtcaagccacagatccacacagtattgctgaacggttgcgcagagaaagaatagccgaaagaatcagggcattgcaggagctggttcctagtgtcaccaagacggatcgagccaccatgcttgatgaaatcgtggattatgtgaagtttttaaggcttcaagtaaaggtattaagcatgagtagactgggcggagctggtgctgtcgcaccacttgtaacagacatcccactatcatcagttgaggatgaaactggcgaaggaggaagaaaccaaccagcttgggagaagtggtcgaatgatggcactgaacggcaggtagctaagctaatggaggaaaatgttggcgctgccatgcaatttcttcaatcgaaggctctttgcatcatgcccatctcactagccacggccatttaccatacacaaccaccagataccactactattgtcaagccagaaacaaatcccccatcatagaaccgttgaaaggggggggagcatcccatggtcctgtctaaaagagtaaagtcaccaaatgcttagggtcccacgtcttatttgtcacgtttcaacccccacaatcaaatgttcccctagtttcaaattgcaatcaaagtcagatgccatagttcttgcttttgccttttctttccagccttttttttttcaaacggggttcgatgtcaatgcctaaaaaaatgcaggcaggcccttggtgtcctgccaagtccaagtgagaggagaattttcaaagcttactcgatatgctcttcttttggaatcagtggtggggaagtggaaaatgatggaagcgcttttgtaatggggctctaatttttcgtagtgggttgtgggaccttgtaaaagaggcaagactgacgggttatataaatatatcattattgtaatagtgtattcagcgtaaatggaatgcaaaggtagaattgaataatggctggttgtttcaatatgctgggtgtttcaagtccaacagaaaatgatagcagtgctactttgttc

SEQ ID NO: 378 - DNA, 1890 bp, Poncirus trifoliata
ctctctctcttcttcctgttctcacctatttagtatttaacatccatcagaagaatggtttccattctcttgaagaaattcttgactcttcaaatttaaatttccatatatcataaagacttgttctcaagaaattaagatgcagccttgcagcagcggcggtgaaatgcaaggaatcagctcgctcttgagcaacggaagccacgagcagcagtcgcagatccatcaaagcgcgacgtttgatccaacttcgcaagacgacttcttagagcaaatgctatcctctctcccatcgtgttcttggactgacttgaagtctccctggggggttgttgaccttaaccctaataacaataataataatattaacaacaagcagcccagagacttatctgacgaaacggcgccgtccactactcaagagaataatgtccctgcagggtttcagttcgatgagtccatgatcttagcttccaagatgagacagcatcagatcagcgggaatactgggagtgggaataataattctgctgcagcaaagtttatgatgcagcagcagcagcaacaacaaatcatgatggctgctgctagaggtggcatcgggttgcctttatcacttggaaatggtggcgataacgacatcgttgatgcctcatcattcaagtcccaacagggaggagatggctcagtgcaagcactctacaatggcttcactggatctttgcatggctcaacccagcctcaacattttcatcatcttcagggaggatcgatgcccgggcagacctttggggcaccagggccggtgatgaaccagacgcaggctcaggcaagtgggtcaaccggtggtggtggaaacacacccgctcagcagcctaaacaaagggttagggctaggagaggtcaagctactgaccctcacagcatagctgaaagattgcgcagagagagaattgcagagagaatgaaagctcttcaagaacttgttcccaatgccaacaagacagataaggcttcgatgctggatgagatcattgactatgtcaaattcctccagctgcaagtgaaggtcctgagcatgagtagattgggcggtgctgctgctgtcgcaccccttgttgctgatatgtcctcagagggggcaggaggaggtgattgtatccaagcaaacgggcggaaccctaacggagctcagacgacgtcagctaacgacagcttaactgtgacggaacaccaagtggctaagctgatggaagaagatatggggtcagccatgcagtacttacaaggcaaagggctttgtctaatgcccatctcacttgcaactgctatatcgtctgccacgtgtcactctaggaaccccatcatcagcaccagcaacaacaacaataacaacggcaatccccaccacaatcctttgtttcagtccaatggggaaggcccgacctcacctagcatgtcagtgctgactgtccagtcagcaactatgggtaacggtggggctgacggctccgtcaaagatgctgcttccgtttccaagccctgatcaacggacgtcgactgactttatgatgaggctcgtccaaagtctacgaaaataaggcgtcactagatgttggaccttcacgacgtcgtatttgtgtagactttgtgactgaatctaacaaacaacaagaaagcaagaaagaagccaatcccaagaacaaaaaccttattttatgttgttattattattttaatttgcgggttaggttttgttaattttactattattaaaattttaatttctctgatgggatatctccctctttttcttttatttaatattctctgtcatgattctctattaaataattatttataaaagcctttaataattagattataatt

SEQ ID NO: 379 - DNA, 1870 bp, Ricinus communis
cccaacgctgcattttcaggatttctctctctacactacaagaacttgaagccagtacccataaaaccatataccatcttggattccacaacccctttcctggttattgggctgtggatctgccacccaattcaccaacactttctttttctcgggtttcgcatacttcaattcccctcttctctcgtctcttctatttgtctctctaaaaacatactctctccctctctctctctctctctctctctcctcagctaattgaaacatcaaaaaggaaaaagcattaccatattttttacactctaaaacatcaaactttatcactaatactacgactgctactgctactctaaaactacttttgcaatattattgcatggcgggaaatcccccacctgagggattaggagatgatttctttgagcagatcttggcagtgcagccagggtatggaggcggtgatggtggtggcggtggagacgtggtggggtccaccatgcctatgatgggtctacagttggggtctgccagtagtggtggtggtggattgagaactaataatatgggcatgatgcctttagggttaaacttagagttcttgaggcaacaagaagatggtagtggtgctttagataacaacaaccataccaataacaacaataataatgtttcatcttctacaacttctgttatcaatgatagagattctgttcacatggcgagtttgttcccaacgtttggacagttgcaaacccagacgctccggcctccaccaccacctcacctccaccagccatttcatggtcagccaacaccaggagtggtttctgctgcatcacagccacctgccattcgcccaagggtgcgagcaagacgaggacaagccactgatcctcacagcattgctgaacggctgcgtagagagaggattgcagagagaatgaaggctttgcaggagttggttcctacagccaacaagacggacagggcagccatgattgatgagattgtggactatgttaagtttctaaggcttcaagtgaaggtattgagcatgagtagactgggagcagcaggtgcagtggctcagcttgtagctgatgtaccgctagcatcagttgagggagagagcattgacggagcagcagcaaatcagcagacttgggagaagtggtcaaatgatggtactgagcaacaagtagctaagttgatggaagaagacataggagctgctatgcaattcctccagtccaaggcactttgcatcatgcctatatcacttgcttcagcaatccttcgaacacacccccctgatgcaccatcaattatcaagcctgaatcaaacaccccatcataaacctaaccaagaaattaatctcctttcacgtgcagatgaattgctaccagcagacatctgggccccaagtgctggtatagtcccatataactcattctaactcctcattataaatatatatatatatataataaagaaacaatatccagttggtgcagctgttcattttctttaggaggagtcattttcatgtcaagtaagaagaatcacggggcacttgatgtttataatgctatggtcaaggcaaatccaaaatattcaaaaagctccattgatgtgcttctatttcttgtatctgtggtggggttagtggagaatgaccaaaaaattaatagatagtgctaagaaactcttctgtttcatttctcttttggatagtggaagtgtagggccatcaaaaagggggttgataggcagtgtgcatgatgtatttgaaaaatttgtgtggaagttgaatcggataaatgtaggtttgtcgtgtaaatccatgttggaaacttcatgcttgacaat

SEQ ID NO: 380 - DNA, 1008 bp, Ricinus communis
ctcctctcaggccgactcctgcaaatggcaaacaatcccacagaacctccagccgacgatttcctccaagaaatactcggcctacctaacttcgcttcggctgacgcagccggcttggtcggagccgacggtgccttggctactccgatgatgctgcagcttagctctggagacggctccaaccacatcactgccctaggtggagggggaggaggaggaggaggcgctggatttcacgggtttccgttggggctaagcttggagcaaggaaaaggagggtttttaaagcctgaggaagcttcgggaagtggaaagaggtttcgtgatgacgttgtcgatggcagagctaatactgttaagaacgtttttcatggtcaaccaatgcccacaactatggctgcagccccacatcctcccacaatgcgccccagggtgcgggctagacgaggacaagccacagatccacacagcattgctgagcggttgcgcagagaaagaatagctgaaagaattagggcattgcaggagctggttcctagtgtcaacaagacagatagagctgccatgcttgatgaaattgtggattatgtgaagtttctaaggctccaagtgaaggtattaagcatgagtagattgggcggagctggtgcagtcgcaccacttgtaacggacatcccactatcatcagttgaggatgaaactggggaaggtgggagaaaccaaccagcatgggagaagtggtcgaacgatggcacagaacgacaagtggctaaactgatggaagaaaatgtgggtgctgccatgcagtttctgcaatcaaaggctctttgcatcatgcccatctcactggccacagcaatttaccatacacaagcaccggatacctcaactattgtaaaaccagaaacaaatcccccatcatagaccgtacaaacgggtaagcatcccatggtcccatctaaaaaggtcgcctaagtgcttggggtcccacattttgtttgtcccgtt

SEQ ID NO: 381 - DNA, 1141 bp, Sorghum bicolor
tactggacttccccttccccagcagagcagagcagaccaaccgcttgtcgcgagccgcccgaagcttcgggccctgacgcgtgggccccgaccgcgcccgcccccgcccccgcgtcgccgggcatggcggggcagccgccgccgcccgggggctccgaggacgacttcctcgagcacttcttcgccttcccctccgcggcctccgccgccgccgggggacacgcgggcgccggtgccggcggggaccaccccttccccctcgccctcagcctcgacgccgccgccgagcccaagccggaccgtgaccccgtgcagctcgccggcctcttcccgccggtgttcgctggcgccggcggcgtgcagcaaccgcacctccgcggcccaccgcctccgcagatgttccaggcgcagccgaagccgggcgagggaggcatggcgccgcagccgccagccccacggcccaaggtgcgcgcgcggcgggggcaggccaccgatccccacagtatcgcggagaggctaaggagagagagaattgcagaaaggatgagggcattgcaggaattggtccccaacacaaacaagacagatagggcagctatgctagatgagatccttgattacgtgaagtttcttaggcttcaagtaaaggttttgagtatgagcagacttggtggtgctggtgcagttgcacagctggttgctgatattccactctcagttaagggtgaggcaagcgacagtgggagcacacagcacatatgggaaaagtggtcaactgatggcacagaaaagcaggtagcgaagctgatggaagaagacatcggggcagcgatgcagttccttcaatccaaagcgctatgcatgatgccgatctcgcttgcaatggcaatctacgacacccaacattcccaggatggccactcactgatgaagcctgagcccaacacatcctcgtagtatagtaacatcaaccctagcgtgcatttcaaccccctaatactattaggcaccgatatatccaaaaaaaaaaagtgtatgatatacggagcgttccaatgtgctaaccgtgagataggaaaggaccttaaattggtatatgatgtagcctcccctttccctattttatttcaaatcagagcag

SEQ ID NO: 382 - DNA, 1409 bp, Solanum lycopersicum
agcaaagctttaggtgactccctttcctttattttcttcatggctctcactgctctttagaaagtagcaaaacacacacacaaacaacccaaaacacacacttccatttccattttttgcctatatatatatatatatatgtaacaagtacttgttagagtactaatttgtacaccctcttatcaattccgttgtaaagaacacttttttaactagtatttgttcaattgaatgcttttctgaggaattaaggtggtcgaaaacagctccgatccaagaaagattgaatctttatagtttctgctatggctaacaacccttctgagggaccttctgatgatttctttgaccaaatcttgggatttcctgcttacaatggagcagaacctaatttggcgggaaatgatgccggagctataccgccggcgatgatgctccagcttaactctggtgatgggtcaagtcagtttactggagtgggtcttggggttggtttaggtggtggggggttccatggtcatggtgggggtggttcttttcctttagggttgagtttagaacaagggaaaggtgggttcttgaagatggatgatgtttcagcacctggaaggaggtttagagatgatgttgttgatagcagagcttcttcttctgtcaaacctggttttcatggacaaccgatgccttcaatgccgcatccccctgcaatacgtccaagggtgagagctaggcgaggacaagctactgatccacatagcatagcggagaggttacgtagagagaggatagcagaaagaattagagcattgcaagagttggttcccagtgtcaataagactgatagagctgtaatgcttgatgaaattgtagattatatcaaattcctacggctgcaagtgaaggtgttgagcatgagtaggttaggaggagctggtgcagtagcaccacttgttacagacattccaatatcatcagtagaggaagagagcagtgaaggtggaaataataaccaaccagcttgggaaaagtggtcaagtgatggcacagaaaggcaagtggctaaactcatggaagaaaatgttggtgctgcaatgcaatttcttcagtctaaagcactatgtataatgcctatttctcttgcatcagcaatttatcactctcagccaccagatacatcaagtcttgttaagccagaaacaaatcctccttcatagatgaacacccttatagaaaaaggtgacataacatgctaatgaccttaaagaattttcttgcagtggatggttcctacttttatctattcaagtaatatttagctttttgttgaaaaaacagggttcttttttaaaaatatttatgtataaagtaaaccattttctatcatttatatatttgagtagttttgttct

SEQ ID NO: 383 - DNA, 1632 bp, Solanum lycopersicum
gctcattttccgttcctcttaaagctcaataaacctatacgccggcaaactccggcatggcggacaacccaccggaggtatatgctgccgatgattttctcgagcaaattctggcgattccctcttatgctagcctgccggtaactgatttaaccgccggtgcctcatcggagaattcaacatctggtgtctctcagctccagcagcagccgttgttcccattggggttaagtttggataatggctttgctgacgccaacaacactggaggttttcaagtgaagactgaaagagaagcaatgaacatggggaatttgtatccaggtctagaacatttgcaatctcatgctgtttgcctaagtgttcctcaagttcaccaagtccagccttttcaaggccaccctacatcaagcgcaatagtaacaataccacaccaacctgcaattcgtcctagggttcgggcacaaagaggacaggccactgatccacatagtattgctgagcggttaaggagagaaaggatatcagaacgaataaaggctttacaggaacttgtccccagctgcaataagaccgacagggcagcaatgcttgatgagattctggactatgtgaagttcttaaggcttcaagttaaggtactgagcatgagtaggttgggaggaactagcgcggcggcacaagttgttgctgatattccattgcagtctgttgagggagacacctgtgaaagtcattccaaccagcacgtctgggagaagtggtctgattctgaaacagagcaagaggtagcaaagctcatggaggaagatgttggaacagccatgcagtaccttcaatccaaatcactctgcatcatgcctatttcacttgctgcacttatctatccgactcagcaaagtgacaaccaatcaatggtcaagccagaacaagcggccccattgtagacttctaaattactgcaggtgcaatcaagaactcctaatttcttttaggcccatccgtctatatatccttacctattttctcttgaatcaccctctgaaatccttggtaatgcaatcaaactcagatgacacaatttttgcttttagctcaatcattggcccctttatcaactttcttgagttcagtcacaccttgaacaatggcaacacttaagaaagcaaccaatccatctatctatatcattgtagggaggagtgtatatttttttttccaaactctctgttattagctgcttgtttccccctcactcttgtgggttggttgtgactccttgtatcttttttatagtggatagctagcgatgtattataaaagaaaattgtcccagcttgcatttggtggactgtgcggggagaaagaaaccaagtttgtttgaagacaaagccattagtatacagaaactaaagatggaatgtttagggcttttctttttttggtgtaaccatagcttaatggatgatttagaatcaacttatgatgtactagattccttgtgagaagattaaggattaggagcttcttcatttctttatttctgttcttttgctcatctggatgtatatatgggggattacacaccctttgtgtagtttgttattaatacacaaaaatgttacctgttcc

SEQ ID NO: 384 - DNA, 1135 bp, Solanum lycopersicum
ttccatttcagttcctcaaaacccttaacttcttctcgccgggaaaaaaattaatttcgccggataaatctccggcatggcagcaaaccaaccggaaggctatgccgacgatttcctcgagcaaattctcgctattcctccctactctggcttgccggttgctgatgttggcactccatcagagacgacgtcgtttacctcggcgtctgccgtatctcatcttaactctgccgctgctgctggcctacagcaacctttgtttccgctgggattaagcttggataacggccgtgatgacgtcggcgatgcaggtccttatgcagtgaagcatgaaagagatggaatgaatatcggaaatctatatgcaggtctagaacacttgcaatctcatgcagttcgtcactctgtgccttctgttcaccatgtccagccttttcaaggcccaccaacaacgagcacaacagtaactgtgccacacccaccttcaattcgtcctagggttcgagctcggaggggacaagccacagatccacatagcattgctgagaggctgagaagagagaggatatcagaaagaataaaggctttgcaggaactggtacccagctgcaataagacagatagggccgcaatgcttgatgagattctggactatgtgaagttcttaaggcttcaagttaaggtactgagcatgagtaggctgggaggagccagtgcagtggcacaacttgttgctgacattccattacaatctgtgggagggggacagtggtgaaagtagatccaaccagcatatatgggataagtggtccaatgttgacacagaacgagaggttgctaagctcatggaggaagacgtcggtgcagccatgcaataccttcagtctaaatcactctgcatcatgcccatatcacttgctgcactcatctatcctactcaacaaccggatgaccagtccctggtcaagcctgaagcagcagccccatcatagaccttcaattcgttgcacgtgcctctaagaactcccaatagccttgtgtcccccctcctttgtatccttacctaccatccatttgtattttcctgtgtaattggtggcaatgcaatcaatgtcagatgccacaacttttgctt

SEQ ID NO: 385 - DNA, 1348 bp, Solanum tuberosum
ttagaaagtagcaacacacacaaacacccaaaacacacacttccatttccatttttttgcctatatatatatatatatgtaacaagtacttgtgagagtactaatttgtacaccatcttatcattttacttgtaaagaacacttttttaagtagtatttgttcaattgaatgcttttctgagaaattaaggtggtcgaaaacagctccgatccaagaaagattgaatctttatagttctgctatggctaacaacccttctgagggaccttctgatgatttctttgaccaaatcatgggatttcctgcttacaatggagcagaaactaatttggcgggaaatgatgccggagctataccgccggcgatgatgctccagcttaactccggtgatgggtcgggtcaatttactggagtgggtcttggggttgggttaggtggtggggggttccatggtcatggtgggggtgcttcttttcctttagggttgagtttagaacaagggaaaggtgggttcttgaagatggatgatgtttcagcacctggaaggaggtttagagatgatgttgttgatagcagagcttcttcttctgtcaaacctggttttcatggacaacccatgccttcaatgccgcatccccctgcaatacgtccaagggtgagagctaggcgaggacaagctactgatccacacagcattgcggagaggttacgtagagagaggatagcagaaagaattagagcattgcaagagttggttcccagtgtcaataagactgatagagctgtaatgctcgatgaaattgtagattatgtcaaattcctacggctgcaagtgaaggtgttgagcatgagtaggttaggaggagctggtgcagtagcaccacttgttacagacattccaatatcatctgtagaggaagagagcagtgaaggtggaaataataaccaaccagcttgggaaaagtggtcaagtgatggcacagaaaggcaagtggctaaacttatggaagaaaatgttggtgctgcaatgcaatttcttcagtctaaggcactatgtataatgcctatttctcttgcatcagcaatttatcactctcaaccaccagatacatcaagtcttgttaagccagaaacaaatcctccttcatagatgacacccttatagaaaaaggtgacataacatgctaatgaccttaagaattttcttgaagtggatggttcctacttttatctatttaagtaatttttagctttttgttgaaagaaacagggttttttttttttatgtttatgtataaattaaaccattttctatcattgatatattcaagtagttttgttttcagc

SEQ ID NO: 386 - DNA, 1469 bp, Solanum tuberosum
gatttcagttcctcaaaacccttaacttcttctcgccggaaattttttttaatttcgccgggtaaatctccggcatggcagcaaaccaaccggaagcctatgccgatgatttcctcgagcaaattctcgctattccttcctactctggcttgccggtagctgatgttggcactccatcagagacgacgtcgtttacctcggcgtctgccgtatctcatcttaactctgccgctgctgctggcctacagcaacctttgttcccgttgggattgagcttggataacggccgtgatgacgtcagcgaagctggtgcttatgcagtgaagcatgaaagagatggaatgaatatcggaaatttatatgcaggtctagaacacttgcaatctcatgcagttcgtcactctgtgccttctattcaccatgtccagccttttcaaggcccaccaacaacgagcacaacagtaactgtacctcacccaccttcaattcgtcctagggttcgagctcggaggggacaagccacagatccacatagcattgctgagaggctgagaagagagaggatatctgaaagaataaaggctttgcaggaactggtacccagctgcaataagacagatagggcagcaatgcttgatgagattctggactatgtgaagttcttaaggcttcaagttaaggtactgagcatgagtaggctgggaggagccagtgcagtggcacaacttgttgctgacattccattgcaatctgtggagggggacagtggtgaaagtagatccaaccagcatatatgggataaatggtccaatgtagacacagaacaagaggttgctaagctcatggaggaagacgtcggtgcagccatgcaataccttcagtctaaatcactctgcatcatgcccatatcacttgctgcactcatctatcctactcagcaaccggatgaccagtcactggtcaagcctgaagcggcagccccatcatagaccttcaattcgttgcacgtgcctctgagaactcctaatagccttgtgtcccccctcctttgtatccttacctaccatccatttgtattttcctgtgtaattggtggcaatgcaatcaatgtcagatgccacaacttttgcttttatcccaaccattggccctttttttttaattacctttctggagtttcgtcaaacaaggcatgatgtcatcataccttggagaaaggtaaacgtatgaaagcacccaatcaattagcatcattttcggatgaggtgagcttctttttcaaagttatctatgattagctgctcttcttccaccattttgttgtgggattgtggggactccctttatcctttgcatagtggatggtggggctttgtaaaagtaaccaactggttgttggaaagtatattgtaattttagtatattattgtaatgggtagttgaagttgctctccctccaaaaagttttg

SEQ ID NO: 387 - DNA, 772 bp, Solanum tuberosum
cttctatctttctctcttctccttttagaaccaaactttcacacacaaagctactgaagaaaaaatttctctctgcaaaatctcagagaggaaaaaaaaaatgcaagccatgaattcacttctaagtcaacaacagcagtcacagatgtcactgcaagaccttcaaaatggcggaaatggcggttctaccggtggtgttggtggtttaggtcaacacaatatgggtcactttcactttgatccgacgtcgtctcacgacgattttctcgaacagattctctcttctgttccttcttcttctccttggcctgacctttccaaatcctgggacccacatcaccatctctcatcgccgccgcataaccctagctccggcgaagatcaacctccttctaatccacttcactcacagttccattacgacgaccaggcttcttctctactagcctcaaagctccgtcagcatcagatcactggcggcggcgcggctgcagctgctaaagcacttatgctacaacagcagcttttgctttctagaacactcgccggaaacggactcaggtctcctaatggagcttccggcgataacggcctcctttccctacctctaaacctcagtaataatggtgaccaaaacgatggcgtcgctaacccggctaatgacaattccgttcaagctcttttcaatggattcaccggatctcttggtcaaacctccaatcaacctcaacattttcatcatcctcagggaggatcgatgcaatcgcagagt

SEQ ID NO: 388 - DNA, 1290 bp, Solanum tuberosum
gaaagaaaaaaacaatgcaagctatgaactcatttcaaagcaccggcgaaaatggtgcttcgtccggcgaacacatcagtcattcccatttcgatccgtcgtcgtcacacgacgacttcctccaacagattctctcttccgttccttcttcttctccctggcctgaaatctccggcgacggtcacccctacaatttcgacgaccatcagtcaactctcttggcttccaagctccggcagcatcagatcaacggcggcagctctgctgccgcagctgctaaagcgttgatgcttcagcagcagcttctgctttctagaggaatcgccggtaatggcggcgatcaaaacgacgacggtttaaatccggggaatgatatttcagttcaagctctttacaatggattcgctggatctcttggtcaaacctcaaatcaatctcagcattttcaccattctcaggcgcagagtttcggagctccggcggcgtcgttgacgatgaatcaaacgccggcggcgagtggttcagctggtggagcgcagccaaagcaacagaaagttagggctcgaagaggacaagcaactgatcctcacagcattgctgaaagattacggagagagagaattgcagagagaatgaagtctttgcaggagctggtacctaatgccaataagacagacaaggcttcaatgttagatgagatcatcgactatgtcaggttcctccagctccaagtcaaagttctgagtatgagcagattgggtggtgctgcagctgttgctcccctagttgctgatagatcctctgagggaggaggtgattgtgtacaaggaaatggaggtcggggtggcagtaatggaacgacgtcgtctgcaaacaatgacagcagcatgacgatgacggagcaccaggtagctaagctaatggaagaagatatgggatcagcaatgcagtatcttcaaggaaaaggcttatcccttatgccaatttccttagccactgctatttccacctccacgtgtcactccatgaaacccaacaacccactactactcggcggaggctccgctatcaacggcggtggtgagaccggcggtggaccgtcttctcctaccttgtcagcttccactgttcagtcagctacgatgggcaatggcgggacttgagttagtcctcctatcccaatgtgactcactgtttttatttagaatcaatttgattttatatttctcgttttatactattatggaattatttatagtcatattaatattgatgacttgtttttagaaa

SEQ ID NO: 389 - DNA, 2210 bp, Triticum aestivum
cacgagggcaagccaaagcctccgcctctctcctccttttccgcccaaacaaaccgccccctcccctcccgtcgccctcacctccgccctcgccggcagtagtatacgcccgccaccagctccgacgacccgcgccttcccccccgctcgcccgccgtcgtctcccctgcccgctcccccgtccctccgccgcgggtttgttctagagggtgtatctgaagttctctcagcatccgagtgcgcagctttgtacaaaaggaaccattcaggccatctcagattgtcttcatggatgaatgataggatcaccagttgctgtcactttaagtatctacaagtcactcttttcataatatttctgagcagaggttggggagtcaagttgtaagggtgtaaagatggactactctaatggttctttctttccttcatggcctggcaattccgcttccgagaattatagctttgttgatggttcagtggaatcatatgcagaagaaggaagtatgccacctacaggctatttcagagctagatcaaatcagaatttaacatttgatgagcatgaacagaaccctgctatgcttgcaaatgggtgcttgccgtacaacacccagactgatctattatctggtgagattctgtcagaggacaaacattccaacagccttatggagctttccacaacttcagaacaatggcagtctgcaaagtaatttaatcccaccagggactcttcagtgcacttcaacacctggaacatttgacccgcagttggatacccctggccttctagaacttcctcatgccttgtccagttcaattgaaagcaatggtagtgaagtttcagcttttcttgctgatgtacatgctgtttcttcagcctcaactctctgttcgacattccaaaatgttccttcctacatggagccagtaagcctagaagctttcagttttcaagggatacaaaatgctcctatgttcaacaatacaagtcattcaaatgggaaacctgtcagtatttgatgaggcaaccatggcatcactacatgatagcaaagaatttctcagtggtagcatctcatcttttggtacggccgagcagtcacaactagctggtagtggtttgaaggctgaacaacaggaacaaaatgcgatgtgcaatattccactccctttcgcttctggtagtcagatggcagtgagtgaagcacaaggggcaatgattccttcaaagataagctcaacgatccataacaataaaagtgagtaccctgtccctatcagccattctgctgatgcgcagaacaaggcaaattcagctaatggaaacagtgccagtgctaagccacgagcaagggctcgtcgtggacaggcaactgaccctcatagtattgctgaacggcttcgcagagagaagatctcagagaggatgaaaaatctccaagaccttgtaccaaactcaaataaggcagataaatcatcaatgctcgatgaaataattgattatgtgaaatttcttcagcttcaggtgaaggtcttaagcatgagtaggctaggagctcccggggcagttcttcccctccttgcagaatctcaaactgagggccgtagcaattcacctctatcatctccaaccgcttcacaagggcttctggatgcagcaggcccagaagacagcttggtctttgagcaagaagttataaagctgatggaaacaagcatcacaaatgcaatgcagtaccttcagaacaagggcctctgcctgatgcctatcgctcttgcttcagccatatccaaccagaaaggcacttctgcagctgcaatccctcctgaaaggtgaaaacagaaagcacatcatgctcctcccatcggcccgcggaaacaactgtcgaaatgtgctagagttcatagaagttgtgagaaaacaaaaatccgaggctgaaggataggaagttatgcgactaatagtacaagcttatggtataatctagtagcttactccaagaaacctatactttttctcttctctgttgcacatcggttggtgtgtattcttttgttttttggacggcattctaactgggtacaagtgtctggcaccttgggttgtacatggatctatgagggttattaccgactgttcatgatgttatatgatgatcaaagcagacctaggaaaactcggttgctttgggtttcacttggtt

SEQ ID NO: 390 - DNA, 1458 bp, Vitis vinifera
atggatgagtatctggatcacttgttttcatccacatcatggtcagatgtgaatgtgaaggagggatcatcttggatttgtggtgagcctagccaaacaaatgggatgctttcagattcaattggaatatatgaaggtgataaaaaaaactcacctgttggcatgactaattcaaaccttatgatcgagggcttggttactcaagatacttcatctattgttcttggtggagagtctgatcatggtcttggcaagggcttacttttggaagaagctccacggcagcaagaccttcaaaacactgaaggcaattcctccttgaatggagcagtgaatggcagctcagaagttggatacgtgggcctgcaactaaatactcctacttcaaccccatgctcactggatcttggctctcccaagcagctttcgctgattggtggcatgtctaggtcatctcgtcctttcactgagctggatcatgttgggtgcaatggtaatgagccatctgattttcagagatcagttggaaattttcaagcattgcctccaattccacagttgtggtctcaaccatcttacgggggtggttcctccttgtctcctgttatgggagaatacaagatgcagggctttggtctgcaaggagaatatgtggataatgaaatggatatcatgaggaacagatacgttggggatgaaattctgcaacttgataacatttcttcagcaatccccataaaggggaaagaagagcagcacactcatcctttctctccttctgcggttgggccccacatgacaatgacagcatctggattacagtctttgccacagactacggtaggtactgcttctggtggctgtaatggaactggaaagccgcgtgtaagggctcgtcgaggccaggccactgatcctcacagtattgctgaaaggcttcggagagagaaaattgctgaaaggatgaagaacctgcaagaacttgttcccaattccaataagacggacaaagcatctatgctcgacgaaatcattgagtacgtcaaatttcttcagctccaggtcaaggtactaagcatgagtaggctgggggcagcagaggcagttgttcctctcatcacagatggccaagctgagggctctaagggtctgtcactttcaccctcggctggtcaagctgaagatatttgtcaatctcctgatcaaattgcctttgagcaagaagtagtgaagttgatggagtccaacgtgaccatggccatgcaatatcttcaaagcaaaggtctctgccttatgccaattgctcttgctacagccatatccagtggaaaggcagcatcatcaggtactgggtccgatgagggaaagaacgcagcaacaccagtagcagcaacaccagtagcaacagcttacctggcattgggacacatcatacatcttctgatggcaatgttctga

SEQ ID NO: 391 - DNA, 1257 bp, Vitis vinifera
atgctctctactctcccttcttggtctgacctccccgcaaaccctaaatctccctgggaactcaatgcttccaaccctatctccatgccttccaacaagtctagggatttgtccgacgataccacgccgtctaatccggacaacgttcagttcgctttcgacgagtccgccatgttggcctccaagctccgccagcaccagatcagcgggaactcgtcggcggccaagtcggcgttgatgcttcagcagcagttgcttttgtcacgaggcgtcgccatgggtaggtccccgtcgaatgggtccggcgccggtgagtccggccttcttcaactgcctttgtcacttagcaacggggattcttgcctcgttgaccgatcacaaaacgacgtcgttgatgggtcctcctccttcaaatcccccaatcagggaggagacggttcagttcaagctctctacaatggcttcgccggagctcttcacggctccggtcaagcctccaaccaagctcagaatttccaccatcctcagggtggatcaatgcaggcacagaactacggagctccggcgactagggtgagggcaagaaggggtcaggcaactgacccacacagcatcgctgagagattacgtagagagagaattgcagagagaatgaaggcactgcaggaactggttcccaatgccaacaagacggacaaggcttcaatgctggatgagatcattgactatgtcaaattcctgcagctccaagtgaaggtactcagcatgagcaggttgggcggtgccgcagctgttgctcccctcgttgctgatatgtcctctgagggaggtggtgactgtatacaggctagtgggacaagcggccctacaggaggaagggcaacgaacggaacacaaacaaccacatcaaacgacagcctcacagtgacggagcaccaggtggccaaactcatggaggaggacatgggttccgccatgcagtatcttcaaggcaaaggcttatgccttatgcccatctccctcgccactgccatctccaccactacctgccactccaggaaccccatggtggctgctgccgccgtcgccgcctccaacatcaacaacggcagccacactcacccactcctacctaattccaacgccgatggcccctcctcccccagcatgtccgtcctgaccgtgcagtcagccaccatggggaacggcctggccgacgcgcccgtaaaagacgctgcctccgtttccaagccctga

SEQ ID NO: 392 - DNA, 1010 bp, Vitis vinifera
tcttccttctcacggaagctgagaggccgagagctgagacttcactccaatcaaggccatctcttccatctccgaaaccctaacccaccttccgtacggttccgactcgtccgagtttgagtgatggcgagcaatccctcggaagctccagcggacgattttctcgagcaaatcctcggaattcccacctaccccgcagctgaccctaatttggctgctaatgacgtgaatttggccgctcctatggtgcttcagctcggctccggcgaaggctctggccacatcgccggcgggtaccagggaaccatgtttccgttagggttgaggttggagcagggaaagagcagctttctgaagcccgaagacgcgtctggcagtggcaagcgctttcgtgaggaggttattgatggtagagcttctaccgtgaaaaatgctttccatggtcaaccaatgcaggctaccgttgctgcagcaccacatcctcctgcaattcgcccaagggtgcgggcgagacgtggacaggccacagatccacacagcattgctgagcggttacgcagagaaagaatagcagagagaattagagcactgcaggaactagttcctagtgtcaacaagacggatagagctgcaatgcttgatgaaattgtggattatgtgaaattcctaaggctccaagtaaaggtcttgagcatgagtagattgggcggagctggtgcagttgcaccacttgtaacagacattccattagcatcagtcgaggaagaagcaagtgaagggggaagaaatgaaccggcatgggagaaatggtcaaatgacggtacagaacgacaagttgctaagctcatggaagagaatgttggggctgcaatgcagttccttcagtccaaggcactctgcatcatgcccatctctctcgcatcagccatttaccactctcagcagccggacacaactccactgatcaagccccagacaaatcccccatcgtaaaacctctccccactccc

SEQ ID NO: 393 - DNA, 1599 bp, Vitis vinifera
gggagcaaggaaaccgaagcagggcatttcccaaacatctcttaccgatttatcggacgacctctctgtgacctctttctccaacaatttgacctttttgctaaacccgaaaacaatcctcatctcttctttgcttctcgctggaaaatctattttccgttcccgtccattctctagccatggccaccaacccgcccgaaggttacgccgatgatttcctggaacaaatcctcgcaattccctcctatcctggacacgaccctaatatggtgggaacgggttctaccatggtgctgcagctgagttcaggcgacggctcaggccacgtcgccggaggtggcttccaggggccggtctttccgttaggtctgagcttggagagcgggattccggcgacacaggtggcgccaggaagtggcgagcggtttcgagatgacgttgatgccagaggttcttcagggaggagcgagagagagtcggtgcatttggatggtttgtttccggcgtatggacatgtacagtctctctccgtccgacccgccgttcctcaagttcaccaggcttttcatggccagccaacccctgtcccaattactgctgcgccacacccgccagctatccgcccaaaggtgcgtgctcggcgcggacaagccactgatcctcacagcattgctgagcggctacgtagagagaggatagcagaaagaatgaaggctttgcaagaacttgtccctagctccaacaagacggatagggctgcaatgcttgatgaaattgtggactatgtgaagttcctaaggctccaagtcaaggttttgagcatgagtagactgggaggtgctggtgcagtggcacaactcgtggctgacatcccattgccagcagttgagggagaaacgggtgaaggtggaagcaaccagcaagcctgggataaatggtcaaatgatggcacagaacgagaagtagcaaagctcatggaagaagatgttggagctgctatgcagttcctccaatccaaagcactgtgcatcatgcccatatcacttgccgcagcaatataccctgcacaccaaactgatacccccacgctcatcaagcctgagccaaatgctccatcctagacccctcgaaaatgcacgtgcctgttgacaactcccattgacccctagttggctaatcccaaattccttagtatcctgaatccatatcctaaagtgttcctcactatcccttttggcaatgcaatcatagtcagaagccatagtcttgcttttgcctctttttattctgagttttgtcaaagaaagagtgaatcatgctttgggaaaaaagaaaaggcactttcatcacttcttgccatgctcgagtgaagggggaaaattttcaaagctatattgatatgctactccttttcatttgtgctgcttgctggatggccagaacacttgtggtggggactctctttggttgatgctgtggtcttgtaaagcggatgggatgactacgattccatgtaattaaaatgaatttgaagaaagctgaaatggataatggaaagtcaatttcaatgttatattgcattatttccagtcttggagg

SEQ ID NO: 394 - DNA, 1604 bp, Zea mays
gtcggcggcagctggagagcgaggccgagcgaccagttacagttgccggcgggcaaagtgggccacttggtgccaggacatggccgggcaaccgccaccgcagggccccgaagacgatttcttcgaccagttcttctccatgacggccggcggctcctaccccggcgcaaccgcgggcggcggccgcgcaccgggtgaccagccgttttcccttgcgctcagcctcgacgccgcggccgctgaggcttccggaagcgggaagcacgccgacggtggcaaggcggaccgggaggctatacagctccctgggctcttcccgccggcgttcggcggcggtgtgcagccaccccacctccgcgccaccccgcctacacaggtgttccacgcgcagcagccgaagcaaggcggtgcggcagtcgggccacaaccgccggcaccgaggccaaaggtgcgggcgcggcgtgggcaggcgaccgacccccacagcatcgcggagaggctaagaagagagagaatagcagaaaggatgagggccctacaggaattggtgcccaatacaaacaagacagatagagcagctatgctagatgagatcctagattatgtgaagtttctgaggcttcaagtcaaggttctaagcatgagcaggctgggtggtgctggtgctgtggcacagctggttgctgatatcccactttcagttaagggggaagcaagtgatagtgggagcaaacagcagatttgggagaagtggtcaacggacggcacagaaagacaggtcgcaaagctgatggaagaagacattggggcagcgatgcaattcctccagtccaaagcactctgcatgatgcccatctcgctcgccatggcaatctatgacacgcaacattcgcaggacggacaaccagtaaaaccagaacccaacactccttcctagtatagtggcagcaagcgtaacttgcatcctttcggggctgttagcaggcgttaacctaccaatcaaagcgtaagatagaaatgccggcttcgattcactaacaaggaggaggcagggaaaaaagacctaaaagatcctctccacttgaagttgtaccaaatggtatatgatatcgcctttccctttccgatcttttgttcaaaggtgctttaattgcaaggatatggtaagcaataacctgctcatgctcctccatctttcaatgccccctatgagtgtgagtgatggagagagggagctgctaaaagagtctggcatgctctcataatgtttctttccgggtctgtagtgcactagctagccatacactttgtggtgggggggctgctgcttttctggtagtgggtgtatatggactaatcaaaagggactgatgtatgagtgtgtctgcggcctgcgcaaatggttgacaaagtttagatacaggatgaaatggaagatgatgttgatagcgatgttcttccttctccatttttccaaagtggaggtccgaggcaggctttggtcaatggaggctgagcgtgcgtttcagcgttgctagtggatctgctatctgcgttgaatactttatttatatatggatccacactcttgataagaacattcg

SEQ ID NO: 395 - DNA, 1260 bp, Zea mays
gcttcacacttccccagcagagcaggcaaaccgctcccagtcccagtctctcacctgaggtgactggcgtctcttgtcgcaagccgccagaagcttcggcccctgacgcgtgggggccccgtccgcccccgcccccgtccccacgttgccggccatggcggggcagccaccgccgtccggggcctccgaggacgacttcctcgagcacttcttcgccttcccctccgcggcctccgccggcgctgccgggggccacgcgggcgccggtgttggcggggaccaccccttccccctcgccctcagcctcgacgccgccgccgaggccaagccggaccgtgatcccgtgcagctcgccggcctcttcccgccggtgttcgctggcgccggcggcgtgcaccagccgcacctccgcggcccaccgcctccgcagatgttccaggcgcagccgaagccgggcgagggaggcatggcgccgcagccgccagccccgcggcccaaggtgcgcgcgcggcgggggcaggccaccgatccccacagtattgcggagaggctaaggagagagagaattgcagaaaggatgagggcattgcaggaattagtccccaacacaaacaagacagatagggcagccatgctagatgagatccttgattatgtgaagtttcttaggcttcaagtaaaggttctgagtatgagcagactgggcggtgctggcgcggttgcgcagctggttgctgatattccactctcagttaagggcgaggcaggcgacggcgggggggcgccgcagcagcagcagcagcagcacgtgtgggagaagtggtcgacggacggcacggagaagcaggtggcgaagctgatggaggaggacatcggggcggcaatgcagttcctccagtccaaggcgctgtgcatgatgccggtctcgctcgcgatggcgatttacgacacccagcaccccctggacggccacggccactcgctgaagcccgagcccaacgcgtcatcctagtacagtaacgtcgtccttagcgtgccttccaattccaacacccaccccccttctccctaaaaagtactgttaggcgccgatattatccggaagaaaaaaagaagtgtatgatataccgagcgtgcgtttccagtgtgctgacccgtgggataggaaaggaccgaaaattgttggtatatgatgattatgtagcctcctgtttgcctgttctgtttcaaatcaaagcaatgctcatgcatccaggtttc

SEQ ID NO: 396 - DNA, 417 bp, Oryza sativa
atggcggaggagaagcaccaccaccacctgttccaccacaagaaggacgacgagccggccaccggagtagactcctacggcgagggcgtctacacgtcggagacggtgaccaccgaggtggtcgccggcggccaggacgagtacgagaggtacaagaaggaggagaagcagcacaagcacaagcagcacctcggcgaggccggcgccctcgccgccggcgccttcgccctgtatgagaagcacgaggcgaagaaggacccggagaacgcgcacaggcacaagatcacggaggagatcgcggccacggcggcggtcggcgccggcggctacgccttccacgagcaccacgagaagaagaaggaccacaagagcgccgaggagtccaccggcgagaagaagcaccacctcttcggctga

SEQ ID NO: 397 - protein, 138 aa, Oryza sativa
MAEEKHHHHLFHHKKDDEPATGVDSYGEGVYTSETVTTEVVAGGQDEYERYKKEEKQHKHKQHLGEAGALAAGAFALYEKHEAKKDPENAHRHKITEEIAATAAVGAGGYAFHEHHEKKKDHKSAEESTGEKKHHLFG

SEQ ID NO: 398 - DNA, 3246 bp, Oryza sativa
aatccgaaaagtttctgcaccgttttcaccccctaactaacaatatagggaacgtgtgctaaatataaaatgagaccttatatatgtagcgctgataactagaactatgcaagaaaaactcatccacctactttagtggcaatcgggctaaataaaaaagagtcgctacactagtttcgttttccttagtaattaagtgggaaaatgaaatcattattgcttagaatatacgttcacatctctgtcatgaagttaaattattcgaggtagccataattgtcatcaaactcttcttgaataaaaaaatctttctagctgaactcaatgggtaaagagagagattttttttaaaaaaatagaatgaagatattctgaacgtattggcaaagatttaaacatataattatataattttatagtttgtgcattcgtcatatcgcacatcattaaggacatgtcttactccatcccaatttttatttagtaattaaagacaattgacttatttttattatttatcttttttcgattagatgcaaggtacttacgcacacactttgtgctcatgtgcatgtgtgagtgcacctcctcaatacacgttcaactagcaacacatctctaatatcactcgcctatttaatacatttaggtagcaatatctgaattcaagcactccaccatcaccagaccacttttaataatatctaaaatacaaaaaataattttacagaatagcatgaaaagtatgaaacgaactatttaggtttttcacatacaaaaaaaaaaagaattttgctcgtgcgcgagcgccaatctcccatattgggcacacaggcaacaacagagtggctgcccacagaacaacccacaaaaaacgatgatctaacggaggacagcaagtccgcaacaaccttttaacagcaggctttgcggccaggagagaggaggagaggcaaagaaaaccaagcatcctccttctcccatctataaattcctccccccttttcccctctctatataggaggcatccaagccaagaagagggagagcaccaaggacacgcgactagcagaagccgagcgaccgccttctcgatccatatcttccggtcgagttcttggtcgatctcttccctcctccacctcctcctcacagggtatgtgcctcccttcggttgttcttggatttattgttctaggttgtgtagtacgggcgttgatgttaggaaaggggatctgtatctgtgatgattcctgttcttggatttgggatagaggggttcttgatgttgcatgttatcggttcggtttgattagtagtatggttttcaatcgtctggagagctctatggaaatgaaatggtttagggatcggaatcttgcgattttgtgagtaccttttgtttgaggtaaaatcagagcaccggtgattttgcttggtgtaataaagtacggttgtttggtcctcgattctggtagtgatgcttctcgatttgacgaagctatcctttgtttattccctattgaacaaaaataatccaactttgaagacggtcccgttgatgagattgaatgattgattcttaagcctgtccaaaatttcgcagctggcttgtttagatacagtagtccccatcacgaaattcatggaaacagttataatcctcaggaacaggggattccctgttcttccgatttgctttagtcccagaattttttttcccaaatatcttaaaaagtcactttctggttcagttcaatgaattgattgctacaaataatggtgcaaatcaggtctatatgattgattttgggctggccaagaagtatagagactcatcaactcatcagcatattccgtatagagaaaacaaaaatttgacaggaactgctagatacgcaagcatgaatactcatcttggcattgaacaaagtcgaagggatgatttggaatcgctgggttatgttttaatgtacttcttaagaggaagtctcccttggcaggggctgaaagcaggcactaagaaacagaagtatgagaagatcagtgagaagaaagtatcaacatcaatagagaccttgtgtaggggatatcctgcagagtttgcatcatattttcattactgtcgatcactaagatttgatgataaaccagattatgcttatctgaagagaattttccgtgatcttttcattcgtgaagggtttcaatttgattatatatttgactggaccattttgaaatatcagcaatcacagcttgccaatcctccatctcgtgctcttggtggtactgctgggccaagctcagggatgcctcatgctcttgttaatgttgagaggcaatcaggtggagatgaaggtcgaccaactggttggtcttcatcaaatcttacacgtaataagagcacggggctgcatttcaattctggaagcttattgaagcaaaaaggcacagttgctaatgatttatccatgggtaaagagttatccagttctaattttttccggtcaagtggaccattgaggcgtccagttgtctctagcatccgagacccagtgattgcagggggtgaacctgacccctccggcactctgacaaaagatgcaagcccgggaccattgcgtaaagtatccagtgctgcacggaggagttcaccagttgtgtcctcagatcacaagcgcagctcctctatcaaaaatgccaacataaagaatttagagtccaccgtcaagggaatagagggtttaagttttcgatgatgagggactgcattagtagctgtgctttgtctcagttctccgttcactgtaaattttggcacaccaacttggggagtaagagttctgatattagttgctgtcaggaagtaccataaagctgaattatacaattaaaatttgggatccaatcgcaaaagcacattaaggatatgatggggttgcagatccaaactcacagattccagtttatgctcgtccatacagttataggcactttccatattcttttctttaatctctgtctcttgcttgttattgttatgtcgtggtattcttgttgaggtcatgtttgtgaattgcgaagatggtcatgtataattgccgagaaatcatgtactagtttgttttaaacatgagcaaactgttattttgttcaagctactttaatatcaaaaaaaaaaaaaaaagggcggccgctctagagtatccctcgaggggcccaagcttacgcgtacccagcttt

SEQ ID NO: 399 - DNA, 52 bp, Artificial sequence
  primer: prm06442
ggggacaagtttgtacaaaaaagcaggcttaaacaatggcggaggagaagca

SEQ ID NO: 400 - DNA, 46 bp, Artificial sequence
  primer: prm06443
ggggaccactttgtacaagaaagctgggtcggcgacgttgtgatga

SEQ ID NO: 401 - DNA, 546 bp, Zea mays
atggccgactactaccacggcggcagggccatgtactccaacactgacgagtgctatgacgccggcaggcacggcggcagcgtgagggcgtactcgcgcaccgacgagtactacgacaacgtggacgaccgcatgaggaggcccgcgtacggcgccgacgactgcggctacggcggcaggcagaccgccgtgtacgccgacgagtactcccgcggcggccgctacgaaggctacggcgtcgagcaggagcacttcaagagggaggagaaggagcataagcacaaggagcgcctcggcgaggtgggcgccctcgcgggcggcgcctttgctctgtacgaggggcaccgtgcgaagaaggacccggcgaacgcgcagaggcacaagatcgaggccggcgtggcaacggcggcggcgctgggcgccggcggctacgcgtaccacgagcaccgcgagcagaaggaggcccactacgagagcaggcagcaggagcacagggtgccgcacgggcacgggcacgggcacggctactcctactactgcgactga

SEQ ID NO: 402 - protein, 181 aa, Zea mays
MADYYHGGRAMYSNTDECYDAGRHGGSVRAYSRTDEYYDNVDDRMRRPAYGADDCGYGGRQTAVYADEYSRGGRYEGYGVEQEHFKREEKEHKHKERLGEVGALAGGAFALYEGHRAKKDPANAQRHKIEAGVATAAALGAGGYAYHEHREQKEAHYESRQQEHRVPHGHGHGHGYSYYCD

SEQ ID NO: 403 - DNA, 468 bp, Zea mays
tagataaatcgacggtcggtgcatatatatgagcaagactgccaggcgcgcccggtaacaaatgagaatggaagccgtcagtaactagtggtgatggtgtccacggtggcggtgcttcttggcgtctttcttctggtgatgctcgtggaaggcaaagccggcgctgcccacggcggcggcggcggcgaccccttccttgatcttgtgcgagtgcgcgtgctccgggtccttcttcgccttctgcttctcgtgcatagcgtaggctcctgcagcgacggcgccgagctggccgagctgctccatgtgcttgtggtgcttctcctccttgcgccagtcggtcaccttggccgcctctcctccatggtgcttgttgcccaggaagtggtgcgccattgtttcagtcgttggagatgcgctagtcgacggccggttgtgtcttggggttcgttcgatctgcttgatgatgat

SEQ ID NO: 404 - protein, 102 aa, Zea mays
MAHHFLGNKHHGGEAAKVTDWRKEEKHHKHMEQLGQLGAVAAGAYAMHEKQKAKKDPEHAHSHKIKEGVAAAAAVGSAGFAFHEHHQKKDAKKHRHRGHHHH

SEQ ID NO: 405 - DNA, 434 bp, Zea mays
atggagcagctcggccagctcggcgccatcgccgccggcgcgtacgctctggtgagaccaaaaaaacccaacctccatccctttggtcgcctgatcgatgcatgccatggtccagctcttgatctgtgtgtgtctgtgcgtgtgcatcgacgtgtggctgcagcacgagaagcacaaggccaagaaggacccggagaacgagcacggccaccgggtcaaggaggaggtggccgccgtcgccgccgtgggctccgccgggttcgccttccacgagcatcacgagaagaaggacgccaagaagcacgcccacaactgatccgtcgcaggctgcctcagccgaagcagcagcacatcgtcgcggttgctgtttcatctgttctcccagcctcgtcttcgtctactgtgtgccgggcaggccttgatttgaggctttg

SEQ ID NO: 406 - protein, 144 aa, Zea mays
MEQLGQLGAIAAGAYALVRPKKPNLHPFGRLIDACHGPALDLCVSVRVHRRVAAAREAQGQEGPGERARPPGQGGGGRRRRRGLRRVRLPRASREEGRQEARPQLIRRRLPQPKQQHIVAVAVSSVLPASSSSTVCRAGLDLRL

SEQ ID NO: 407 - DNA, 417 bp, Zea mays
atggcggaggagaagcaccaccaccaccacctgttccaccacaagaaggacgaggagcagctcgccgccggcgggtacggcgagtccgccgagtacacggaggccacggtgacggaggtggtgtccacgggcgagaacgagtacgacgagtacaagaaggaggagaaggagcacaagcacaagcagcacctcggcgaggccggcgccatcgccgccggcgccttcgcactctacgagaagcacgaggcgaagaaggacccggagcacgcgcaccgccacaagatcgaggaggaggtcgcggcggcggcggccgtcggctccggcggcttcgccttccacgagcaccacgagaagaagaaggaccacaaggaggccgaggaggccggcggcgagaagaagcaccacttcttcggctga

SEQ ID NO: 408 - protein, 138 aa, Zea mays
MAEEKHHHHHLFHHKKDEEQLAAGGYGESAEYTEATVTEVVSTGENEYDEYKKEEKEHKHKQHLGEAGAIAAGAFALYEKHEAKKDPEHAHRHKIEEEVAAAAAVGSGGFAFHEHHEKKKDHKEAEEAGGEKKHHFFG

SEQ ID NO: 409 - DNA, 396 bp, Zea mays
atgtcggaggagaagcaccaccacttcttcaaccaccacaagaaggacgaggagcagcccgccggcgagtacgggtactccgagaccgaggtggtcaccgccaccggcgagggcgagtacgagaggtacaagaaggaggagaaggagcacaagcacaagcagcacctcggcgaggccggcgccatcgccgccggcgccttcgcactctacgagaagcacgaggcgaagaaggaccccgagcacgcgcacaggcacaagatcacggaggaggtcgctgccgcggcggccgtcggcgccggcggctacgtattccacgagcaccacgagaagaagaaggaccacaaggacgccgaggaggccagcggcgagaagaagcaccaccacctcttcggctga

SEQ ID NO: 410 - protein, 130 aa, Zea mays
MSEEKHHHFFNHHKKDEEQPAGEYGYSETEVVTATGEGEYERYKKEEKEHKHKQHLGEAGAIAAGAFALYEKHEAKKDPEHAHRHKITEEVAAAAAVGAGGYVFHEHHEKKKDHKDAEEASGEKKHHHLF

SEQ ID NO: 411 - DNA, 204 bp, Zea mays
atggagaagctcggcgagctcggcgccatcgccgccggcgcgtacgccctgcacgagaagcacaaggccaagaaggacccagagaacgagcacgggcaccgggtcaaggaggaggtggccgccgtcgccgccgtgggctccgccggcttcgctttccacgagcaccacgagaagaaggacgccaagaagcacgcccacaactga

SEQ ID NO: 412 - protein, 67 aa, Zea mays
MEKLGELGAIAAGAYALHEKHKAKKDPENEHGHRVKEEVAAVAAVGSAGFAFHEHHEKKDAKKHAHN

SEQ ID NO: 413 - DNA, 1008 bp, Zea mays
ttgtcacttgctctccctccaacaagctaattaaggccggtcatccctcttctagctcgtttcattatccatggcggaggagaagcaccaccaccaccacctgttccaccacaagaaggacgaggagcagctcgccgccggcgggtacggcgagtccgccgagtacacggaggccacggtgacggaggtggtgtccacgggcgagaacgagtacgacgagtacaagaaggaggagaaggagcacaagcacaagcagcacctcggcgaggccggcgccatcgccgccggcgccttcgcactcgtacgtagtccgatcgatccgatcctccttgagtagtatatatatatacatacatgaacgagaaagaataatatatatattaatcgaacgaactgaatgacggtcacctcgtgtgacgtggacatgcacagtacgagaagcacgaggcgaagaaggacccggagcacgcgcaccgccacaagatcgaggaggaggtcgcggcggcggcggccgtcggctccggcggcttcgccttccacgagcaccacgagaagaagaaggaccacaaggaggccgaggaggccggcggcgagaagaagcaccacttcttcggctgattgatcctcccgtatcgtcgtccctccccgtgtgctacgcgtgcgtgtgagagtgatatcgagcgcccgccgtgttgtgcgcgcgtacgtatgtatgcgctcgtgtgatgcacgaataagcgtggctacgtaatctatcgtatgtatacgtgtgtgtatgcatgtgcttgtgtatgatcgtggtacgaggaccgaaaaaatgtatgcaactctgatttacttacatgtttagttgtttacgtttctccaaaagtattagtacccattatgttatattttactatattatattttattgattattaaactatgtatggatgaaattactatttcaagctggtagctagaccgagataaaactcgtccgtgttttttaacgggtgtattatt

SEQ ID NO: 414 - protein, 88 aa, Zea mays
MAEEKHHHHHLFHHKKDEEQLAAGGYGESAEYTEATVTEVVSTGENEYDEYKKEEKEHKHKQHLGEAGAIAAGAFALVRSPIDPILLE

SEQ ID NO: 415 - DNA, 588 bp, Zea mays
agaaggagcataagcacaaggagcgcctcggcgaggtgggcgccctcgcgggcggcgcctttgctctggtaatatatataatacagttaccatatatatatgtgcatgcacgatctatatatgtggtgatgtgttgttgatggaatataatatgtggaaattagtacgaggggcaccgtgcgaagaaggacccggcgaacgcgcagaggcacaagatcgaggccggcgtggcaacggcggcggcgctgggcgccggcggctacgcgtaccacgagcaccgcgagcagaaggaggcccactacgagagcaggcagcaggagcacagggtgccgcacgggcacgggcacgggcacggctactcctactactgcgactgaaacgactgatcatcccatcgatcgagatatgcatgcagaactcgatatatatacggcccctagcgccgtacacgtgcgtgcgtgtaagtaaataagagcaaacgtcgtcacgtgtgtgttgctcgatcactactccatcgatctacttattatcgtctgcaaataacgactaagcgcatgcttctgcagcgtgtaacgatcaaaaaaaaaa

SEQ ID NO: 416 - protein, 110 aa, Zea mays
MEYNMWKLVRGAPCEEGPGERAEAQDRGRRGNGGGAGRRRLRVPRAPRAEGGPLREQAAGAQGAARARARARLLLLLRLKRLIIPSIEICMQNSIYIRPLAPYTCVRVSK

SEQ ID NO: 417 - DNA, 939 bp, Zea mays
  misc_feature (914)..(914): n is a, c, g, or t
ggtcgacgatttcgtcggcccaacactagtagcgtagctgagagcctgagacgatggccgactactaccacggcggcagggccatgtactccaacactgacgagtgctatgacgccggcaggcacggcggcagcgtgagggcgtactcgcgcaccgacgagtactacgacaacgtggacgaccgcatgaggaggcccgcgtacggcgccgacgactgcggctacggcggcaggcagaccgccgtgtacgccgacgagtactcccgcggcggccgctacgaaggctacggcgtcgagcaggagcacttcaagagggaggagaaggagcataagcacaaggagcgcctcggcgaggtgggcgccctcgcgggcggcgcctttgctctgtacgaggggcaccgtgcgaagaaggacccggcgaacgcgcagaggcacaagatcgaggccggcgtggcaacggcggcggcgctgggcgccggcggctacgcgtaccacgagcaccgcgagcagaaggaggcccactacgagagcaggcagcaggagcacagggtgccgcacgggcacgggcacgggcacggctactcctactactgcgactgaaacgactgatcatcccatcgatcgagatatgcatgcagaactcgatatatatacggcccctagcgccgtacacgtgcgtgcgtgtaagtaaataagagcaaacgtcgtcacgtgtgtgttgctcgatcactactccatcgatctacttattatcgtctgcaaataacgactaagcgcatgcttctgcagcgtgtaacgatccatcactgttactatatctaatgatgcatgcatgcaattaagctatatatgtaaaaaactatgcgtgtaaaaaaaaaaaaaaaaaaaaaaaaaaaaaaaaaaaaaaaaaaaaanccaacctaaaaaaaaaaaaaaaaaa

SEQ ID NO: 418 - protein, 181 aa, Zea mays; identical to SEQ ID NO: 402

SEQ ID NO: 419 - DNA, 348 bp, Lycopersicon esculentum
atggaggaggagaaacaccaccaccaccacctgttccaccacaaggacaaggcggaggagggccccgtcgactacgaaaaagaaatcaaacaccataaacatctcgagcaaatcggtaaacttggcactgttgctgccggtgcctacgccttgcatgagaaacatgaggcaaagaaagatccagaacatgcacacaaacacaagatagaggaagagatagcagcagctgctgcagttggggcaggtggatttgcattccatgagcatcatgagaaaaaagatgccaagaaagaagaaaaaaaaaagctgaggggggacaccaccatctcttctaaattgttattttag

SEQ ID NO: 420 - protein, 115 aa, Lycopersicon esculentum
MEEEKHHHHHLFHHKDKAEEGPVDYEKEIKHHKHLEQIGKLGTVAAGAYALHEKHEAKKDPEHAHKHKIEEEIAAAAAVGAGGFAFHEHHEKKDAKKEEKKKLRGDTTISSKLLF

SEQ ID NO: 421 - DNA, 429 bp, Lilium longiflorum
atggccgaggagcaccacaagcaccacctcttccatcacaacaaggagagcaacccggaggtggtcgtctccgagaccaactacatcaccgacggcttaaactccacctacagcacatccagcgatgtatacggtggcaaccagtcacaggccaactacgaggactacgagaaagagaagaagcacatcaagcataaggagcatctcggcgagatggccacggccggcgccggtgcttttgccctttacgagaagcacgaggcaaagaaggaccccgagcacgcccacaggcacaaattggaggaggagattgccgcagctgcagctgcgggggctggagggtacaccttccatgagcaccacgagaagaaaaccttgaagaaggagaatgaggaagtcgaggggaagaagcaccacttcttcggttaa

SEQ ID NO: 422 - protein, 142 aa, Lilium longiflorum
MAEEHHKHHLFHHNKESNPEVVVSETNYITDGLNSTYSTSSDVYGGNQSQANYEDYEKEKKHIKHKEHLGEMATAGAGAFALYEKHEAKKDPEHAHRHKLEEEIAAAAAAGAGGYTFHEHHEKKTLKKENEEVEGKKHHFFG

SEQ ID NO: 423 - DNA, 429 bp, Saccharum officinarum
atggcggaggagaagcaccaccaccacctgttccaccacaagaaggacgaggaggagcaggtggagcagcccgccggcggcggcgggtacggcgaggccgccgagtacacggagaccacggtgacggaggtggtgtccacgggcgaggacgagtacgacaagtacaagaaggaggagaaggagcacaagcacaagcagcacctcggcgaggccggcgccatcgccgccggcgccttcgcactctacgagaagcacgaggcgaagaaggacccggagcacgcgcaccgccacaagatcgaggaggaggtcgcggccgcggcggccgtgggatccggcggcttcgcgttccacgagcaccacgagaagaagaaggaccacaaggaggccgaggaggccggcggcgagaagaagcaccacttcttcggctga

SEQ ID NO: 424 - protein, 142 aa, Saccharum officinarum
MAEEKHHHHLFHHKKDEEEQVEQPAGGGGYGEAAEYTETTVTEVVSTGEDEYDKYKKEEKEHKHKQHLGEAGAIAAGAFALYEKHEAKKDPEHAHRHKIEEEVAAAAAVGSGGFAFHEHHEKKKDHKEAEEAGGEKKHHFFG

SEQ ID NO: 425 - DNA, 777 bp, Zea mays
tgtcgatccaattgtcacttgctctccctccaacaagctaattaaggccggtcgtcatccctcttctagctcgttttattatccatggcggaggagaagcaccaccaccaccacctgttccaccataagaaggacgaggagcaggaggagcagctcgccggcggcgggtacggcgagtccgccgagtacacggaggccacggtgacggaggtggtgtccacgggcgagaacgagtacgacgagtacaaggaggagaagcagcataagcacaagcagcacctcggcgaggccggcgccatcgccgccggcgccttcgcactctacgagaagcacgaggcaaagaaggacccggagcacgcgcaccgccacaagatcgaggaggaggtcgcggcggcggcggccgtcggctccggcggcttcgccttccacgagcaccacgagaagaagaaggaccacaaggacgccgaggaggccggcggcgagaagaagcaccacttcttcggctgattgatccctcccgtatcgtcgtccctccccgtgtgctacgcgtgcgtgtgtgagagtgatatcgagcgcccgccgtgttgtgcgcgcgtacgtatgtatgcgctcgtgtgatgcacgaataagcgtggctacgtaatctatcgtatgtatacgtgtgtgtatgcatgtgcttgtgtatgatcgtggtacgaggaccgaaaaaatgtatgcaactctgatttacttacatgtttagttgtttacgtttctccaaaaaaaaaaaaaaaaaaa

SEQ ID NO: 426 - protein, 140 aa, Zea mays
MAEEKHHHHHLFHHKKDEEQEEQLAGGGYGESAEYTEATVTEVVSTGENEYDEYKEEKQHKHKQHLGEAGAIAAGAFALYEKHEAKKDPEHAHRHKIEEEVAAAAAVGSGGFAFHEHHEKKKDHKDAEEAGGEKKHHFFG

SEQ ID NO: 427 - DNA, 1182 bp, Arabidopsis thaliana
atggactgcaacatggtatcttcgtcccagtgggattgggagcatttgatcatgtccaatccgtcaaggactgaagatgacagcaaacagctacctactgagtgggaaattgaaaaaggtgaaggaattgaatctatagttccacatttctcaggccttgagagagtcagtagtggctctgccaccagcttctggcacactgctgtatcgaaaagctcacagtcgacctctatcaactcatcatctcccgaagccaaacgatgcaagcttgcatcagaaagttcccctggagattcttgcagcaacatagactttgtccaggtgaaggctcccacagctctcgaggtatccgttgcctcagctgaatcagatctttgtttaaaactaggaaagcggacatactctgaagaatactggggtagaaacaataatgaaatttcagcggtttctatgaagttgttaactccatctgttgtcgctgggaaatccaaattgtgtggtcagagcatgccagtcccgcgttgccaaattgatggctgtgaactggatctctcatctgctaagggttatcatcgtaagcacaaagtctgcgaaaagcattcaaagtgcccaaaagttagcgtgagtggcctggaacgtcggttctgccaacagtgtagcaggttccatgctgtctctgaatttgatgagaagaaacgaagctgccgaaaacgtctttctcatcataatgcgaggcgtcgtaagccacaaggagtattttcaatgaatcccgagagggtgtatgatcgaagacagcatacaaatatgttgtggaatggggtgtcccttaacgcgagatctgaagaaatgtatgaatggggtaataacacttatgatacaaagcctagacaaacggaaaaaagctttactctgagcttccagagaggtaatggctctgaggaccagctggttgctagtagcagccgtatgttctctacatctcaaacctcaggtgggttcccagcaggaaagtccaagtttcaacttcatggcgaagatgtgggagaatactcaggagtcctccatgaatctcaagatatccaccgtgctctctctcttctgtcaacctcttcggatcccctggcccaaccacatgtgcagccattttctctactctgttcatatgatgttgtaccaaaatag

SEQ ID NO: 428 - protein, 393 aa, Arabidopsis thaliana; identical to SEQ ID NO: 172

SEQ ID NO: 429 - DNA, 1464 bp, Arabidopsis thaliana; identical to SEQ ID NO: 171

SEQ ID NO: 430 - DNA, 1551 bp, Arabidopsis thaliana
ctgggtgaaacatagaaaagtttctcttgctcaagttaatgataaaagggtgagagcaataaacgctgataagccttgtctggtccttggaattttgaattttctttttctatcttacttatagtattggtagttgagggtgtcgtcgataagttgttgtaggatttgttgctctggctctggtggtaggtctatgaaatcaacccatatcgtgaatggactgcaacatggtatcttcgtcccagtgggattgggagcatttgatcatgtccaatccgtcaaggactgaagatgacagcaaacagctacctactgagtgggaaattgaaaaaggtgaaggaattgaatctatagttccacatttctcaggccttgagagagtcagtagtggctctgccaccagcttctggcacactgctgtatcgaaaagctcacagtcgacctctatcaactcatcatctcccgaagccaaacgatgcaagcttgcatcagaaagttcccctggagattcttgcagcaacatagactttgtccaggtgaaggctcccacagctctcgaggtatccgttgcctcagctgaatcagatctttgtttaaaactaggaaagcggacatactctgaagaatactggggtagaaacaataatgaaatttcagcggtttctatgaagttgttaactccatctgttgtcgctgggaaatccaaattgtgtggtcagagcatgccagtcccgcgttgccaaattgatggctgtgaactggatctctcatctgctaagggttatcatcgtaagcacaaagtctgcgaaaagcattcaaagtgcccaaaagttagcgtgagtggcctggaacgtcggttctgccaacagtgtagcaggttccatgctgtctctgaatttgatgagaagaaacgaagctgccgaaaacgtctttctcatcataatgcgaggcgtcgtaagccacaaggagtattttcaatgaatcccgagagggtgtatgatcgaagacagcatacaaatatgttgtggaatggggtgtcccttaacgcgagatctgaagaaatgtatgaatggggtaataacacttatgatacaaagcctagacaaacggaaaaaagctttactctgagcttccagagaggtaatggctctgaggaccagctggttgctagtagcagccgtatgttctctacatctcaaacctcaggtgggttcccagcaggaaagtccaagtttcaacttcatggcgaagatgtgggagaatactcaggagtcctccatgaatctcaagatatccaccgtgctctctctcttctgtcaacctcttcggatcccctggcccaaccacatgtgcagccattttctctactctgttcatatgatgttgtaccaaaatagatgagtaagtaatgtgtaatttgtaaacctgttactcagttggtggatacttttccaaacctatgataaaaacctcgtcctagatcccgttaaatgccaaactttcggctactataactatgttatcgttatcattatcattgtttaacaccct

SEQ ID NO: 431 - DNA, 1182 bp, Arabidopsis thaliana
atggactgcaacatggtatcttcgtcccagtgggattgggagcatttgatcatgtccaatccgtcaaggactgaagatgacagcaaacagctacctactgagtgggaaattgaaaaaggtgaaggaattgaatctatagttccacatttctcaggccttgagagagtcagtagtggctctgccaccagcttctggcacactgctgtatcgaaaagctcacagtcgacctctatcaactcatcatctcccgaagccaaacgatgcaagcttgcatcagaaagttcccctggagattcttgcagcaacatagactttgtccaggtgaaggctcccacagctctcgaggtatccgttgcctcagctgaatcagatctttgtttaaaactaggaaagcggacatactctgaagaatactggggtagaaacaataatgaaatttcagcggtttctatgaagttgttaactccatctgttgtcgctgggaaatccaaattgtgtggtcagagcatgccagtcccgcgttgccaaattgatggctgtgaactggatctctcatctgctaagggttatcatcgtaagcacaaagtctgcgaaaagcattcaaagtgcccaaaagttagcgtgagtggcctggaacgtcggttctgccaacagtgtagcaggttccatgctgtctctgaatttgatgagaagaaacgaagctgccgaaaacgtctttctcatcataatgcgaggcgtcgtaagccacaaggagtattttcaatgaatcccgagagggtgtatgatcgaagacagcatacaaatatgttgtggaatggggtgtcccttaacgcgagatctgaagaaatgtatgaatggggtaataacacttatgatacaaagcctagacaaacggaaaaaagctttactctgagcttccagagaggtaatggctctgaggaccagctggttgctagtagcagccgtatgttctctacatctcaaacctcaggtgggttcccagcaggaaagtccaagtttcaacttcatggcgaagatgtgggagaatactcaggagtcctccatgaatctcaagatatccaccgcgccctatcgctgctatcgacctcttcggatcccctggcccaaccacatgtgcagccattttctctactctgttcatatgatgttgtaccaaaatag

SEQ ID NO: 432 - DNA, 1586 bp, Arabidopsis thaliana
gccctttttgttggtctgggtgaaacatagcaaggtttctcttgctgaggttattgataaacgggtgagttaaataaaaacgttgatcagcagtgtgtggtgcttggaattcataaggtctatgaaatcaacccacatcttgaatggactgcaacatggtatcttcgttcccgtgggactgggagaatttgatcatgtccaatcagtcgaagactgaaaatgaaaaaaaacagcaatctactgagtgggaatttgaaaaaggtgaaggaattgaatctatagttccagatttcttaggctttgagaaagtcagtagtggctctgctactagtttctggcacactgccgtatcaaaaagctcgcagtcgacctctatcaactcatcatctcccgaggacaaacgatgcaatcttgcatcacaaagttcccctggagattcttccagcaacatagattttctccaggtgaaaccatccacagctctcgaggtacctattgcctcagctgaatcagatctttgtttgaaactaggaaagcggacatactctgaagaattttggggtaggaacaataatgacctttcagcggtttctatgaatttgttgactccatctgttgttgctcggaagaaaaccaaatcgtgtggtcagagcatgcaagttccgcgttgccaaattgatggctgtgagctggatctctcatcttctaaggattatcatcgcaagcatagagtctgcgaaacgcattcaaagtgcccaaaagttgttgtgagtggcctggaacgtcgtttctgccaacagtgtagcaggttccatgctgtctcagaatttgatgaaaagaaacgaagctgccgcaaacgtctttctcatcataatgcaaggcgtcgcaagccacaaggagtatttccactgaattcagagagggtgttcgatcgaagacagcatacaagtatgttgtggaatgggttgtcccttaacacgagatctgaagaaaagtatacatggggtaccacttatgagacaaagcctacacagatggaaagcggctttactctgagcttccagagaggtaatggctctgaggaccaactgtttactggtagcaccctctctttctctgcgtttcaaacatctggtgggttctcagcagggaaatccaacattcaacttccagacaaaggtgtgggagaatgctcaggaggcctccatgaatctcatgatttctacagtgctctctctcttctgtcaactacttcggattcacaagggatcaaacacactcccgtggccgaaccaccgccaatatttggcactttccctagtcatttcatctgaaagagttaaaaaatgcgaagtcactccataaaaagtcgggttgcatcatccgatggagtttgacagtttgttttcaaataaaataaaaatgtgcaacatccattgctcaagctaaaccagtcactcggttagctcagcttttcttatacatttccaaacatattgtcaatttccttctggattctgttggtatgacaactttgttactctgtcaaacatgtctacgactattttaaaaccatttcagagatt

SEQ ID NO: 433 - protein, 396 aa, Arabidopsis thaliana
MDCNMVSSFPWDWENLIMSNQSKTENEKKQQSTEWEFEKGEGIESIVPDFLGFEKVSSGSATSFWHTAVSKSSQSTSINSSSPEDKRCNLASQSSPGDSSSNIDFLQVKPSTALEVPIASAESDLCLKLGKRTYSEEFWGRNNNDLSAVSMNLLTPSVVARKKTKSCGQSMQVPRCQIDGCELDLSSSKDYHRKHRVCETHSKCPKVVVSGLERRFCQQCSRFHAVSEFDEKKRSCRKRLSHHNARRRKPQGVFPLNSERVFDRRQHTSMLWNGLSLNTRSEEKYTWGTTYETKPTQMESGFTLSFQRGNGSEDQLFTGSTLSFSAFQTSGGFSAGKSNIQLPDKGVGECSGGLHESHDFYSALSLLSTTSDSQGIKHTPVAEPPPIFGTFPSHFI

SEQ ID NO: 434 - DNA, 1260 bp, Arabidopsis thaliana
atggagtgtaatgcaaagccaccgtttcaatgggaattggaaaacttgatatcttttggcacttctacagctgaagttcctagaaagctaaaaccaatggagtgggaaattgatggatttgattgcacctctctgtattcttcaagctttgcctatgctggtagttcaggttctgatatagctcatgctttctctaaaagctcaaagtcaacttccattagctcttcatcagctgaagtaagaacacacaattttacatccgaaactggtgaaagtcttcctggagaatttgcaaaggggattgatacttctccaagtcttgaactttcttttggctctggtgatccggttctcggtttaaagcttggtaaacgaacgtactttgaagacttttgggaagtggagaatgctaaaggtttgggacttccagtgactctggcttcatcttctgtttctcccgtgaagaaatcgaaatccattcctcagaggttacaaactcctcactgtcaagttgaaggctgtaatcttgatctttcatcagctaaagactatcatcggaaacataggatttgtgaaaatcattcaaagtttcctaaagtcgttgtgagtggcgtagagcgtcggttctgccaacaatgtagcaggttccactgtctctctgagtttgatgagaagaaacgtagctgtcgccgacgtctctcagatcacaatgcaagacgtcgcaagccaaatcctggaaggacatatgatgggaaaccacaggtggattttgtatggaacagatttgcacttatccatccaagaagtgaggaaaagtttatatggccaagttcgaagcacgtaccatcaagagtgttaatgccgcaacctgcaaagactgagatttccgataccgagcacaatagatttggattgttggaccccaaaaccaaaaccgcaagagccgagttattcagtaaagaaaaggtcacaatctcttcacacatgggtgcttctcaagatcttgatggtgctctctctcttctgtcaaattcaacaacatgggtttcttcctctgaccaaccaaggcgttttacccttgatcaccatccctcaagcaacctccaacccgtagctcaccggtctgcggctcaactcaattcagtttccggctattggcagccggacccacccgcagttgaaggcccgaccgctctgcatagaaatggggtaggccagtttaatgaaaactacttcagcttgaaccagttttataactga

SEQ ID NO: 435 - protein, 419 aa, Arabidopsis thaliana
MECNAKPPFQWELENLISFGTSTAEVPRKLKPMEWEIDGFDCTSLYSSSFAYAGSSGSDIAHAFSKSSKSTSISSSSAEVRTHNFTSETGESLPGEFAKGIDTSPSLELSFGSGDPVLGLKLGKRTYFEDFWEVENAKGLGLPVTLASSSVSPVKKSKSIPQRLQTPHCQVEGCNLDLSSAKDYHRKHRICENHSKFPKVVVSGVERRFCQQCSRFHCLSEFDEKKRSCRRRLSDHNARRRKPNPGRTYDGKPQVDFVWNRFALIHPRSEEKFIWPSSKHVPSRVLMPQPAKTEISDTEHNRFGLLDPKTKTARAELFSKEKVTISSHMGASQDLDGALSLLSNSTTWVSSSDQPRRFTLDHHPSSNLQPVAHRSAAQLNSVSGYWQPDPPAVEGPTALHRNGVGQFNENYFSLNQFYN

SEQ ID NO: 436 - DNA, 1410 bp, Oryza sativa
atgggttcttttgggatggactggaatcagaagagctcggtgttgtgggattgggagaatatgccgccgataggaaatagcgcgaacgagaatcccaagaatgtgatgctggctgaatcaaaacttgcaggtgttggggttgacataggccatgaatcaggccattcttctggtggtactttctcttctagctcagagattgggtatggttcatccaagagttccatatccgcgtcgatcgattctccgtccaaagtggggaacaccatagagctcaattttgcatctgcggaagagcatgataagaacatggacaagggtaagagtaaagttgatgacaccggaacttctcgatcaccggtggtagcagccaatcgtgtagagcccttgattggcctgaagcttggcaagagaacctattttgaagatgtctgtggagggcagaatgtcaagagttctccatctggtgtgagtgtggctaccccatctcctggtctggccaagaaggtgaaggtggctcagcagaacactcagaacccacactgtcaagttgaaggctgcaatgttgatctctcttctgctaaaccttaccatcgaaagcaccgagtctgtgaacctcacagcaagactcttaaagtcatcgttgcgggtcttgagcgacgcttttgccaacagtgtagtcggtttcacggtttagctgagttcgaccagaaaaaacgaagctgtcgcaggcgcctccatgatcacaatgcccgcagacggaagccacaaccagaagcaatttccttaagttcgtcgaggctctctacattactctatggtgatgcaaggcaacaggcaagttttctatttggtcaagctccttatggtcagatgggaagctgtgcaagttcttgggataacccagtaccaggaggcttcaaatttacagcaacaaaagctccttggtcaaggccaacaatagctgccggtgttgatgggacgcatgtatctaatcagcaggcatcgggcaatgtactgccacatggagcacatcatagttttgatggtctcatggcgttcaaagaaaccaacgcgaaggtccttaaccaaggcatggaagcttctgctgtcgcttccggctccgctagaggcccagactttgagcatgctctctctcttctgtcaatcgattcagtgggtgctgcaaaccttcagccaggttctcagattcaccctggtgtcaccgccattgccggcacctccaaccctgtcatgatgccatctccagcaatctggcaaggaggcttgtcccttgatcagcaggcgcagtttcaggctttcgaccgccttggcaacgacgacgacgaagatcatctccagctcccaaagccttcctatgacaactcccactatgatcagatgaactga

SEQ ID NO: 437 - protein, 469 aa, Oryza sativa
MGSFGMDWNQKSSVLWDWENMPPIGNSANENPKNVMLAESKLAGVGVDIGHESGHSSGGTFSSSSEIGYGSSKSSISASIDSPSKVGNTIELNFASAEEHDKNMDKGKSKVDDTGTSRSPVVAANRVEPLIGLKLGKRTYFEDVCGGQNVKSSPSGVSVATPSPGLAKKVKVAQQNTQNPHCQVEGCNVDLSSAKPYHRKHRVCEPHSKTLKVIVAGLERRFCQQCSRFHGLAEFDQKKRSCRRRLHDHNARRRKPQPEAISLSSSRLSTLLYGDARQQASFLFGQAPYGQMGSCASSWDNPVPGGFKFTATKAPWSRPTIAAGVDGTHVSNQQASGNVLPHGAHHSFDGLMAFKETNAKVLNQGMEASAVASGSARGPDFEHALSLLSIDSVGAANLQPGSQIHPGVTAIAGTSNPVMMPSPAIWQGGLSLDQQAQFQAFDRLGNDDDEDHLQLPKPSYDNSHYDQMN

SEQ ID NO: 438 - DNA, 1428 bp, Oryza sativa
atggcttcttttgggatgaactggaatcagaagagccctgtgttttgggactgggaaaatccagcgcctttcggtccgaatacaatggaaaatcccaagagcatacctcaccctgaaccaagaggtgtagttgtcgcggccgcaaatcatggatccaccaattcatccggtggcacgttcacttctagctcggagctagccaatggttcatcgaagagctccttgtcagcgtcgttcgattcctcatccaagctggggaacagcttagagttcaggtttgcttctgtcaaagggcatggcaagaacatgtgcaaggatggcgaggccggtagagttgaagactcgggcacttctccagctgtggcagttagccatggtgagccggtaataggactcaagttagggaagagaacttactttgaaaatgtttgtggagggcagaatgtcaagagctcctctgcagcttcaggtgtgacttgtccatctactgtggtcaagaagatgaaggtgtctcagcagagcacacaaagctcatactgccaagttgaaggctgcaaagtcgatctgtcctccgcaagagaataccatcgcaagcacaaagtttgtgaagctcattctaaggcaccaaaggttattgtttctggtctggagcgccgtttttgccaacagtgtagtcggtttcatggtttagctgaatttgaccagaaaaagaaaagttgccgcaggcgtctatctgatcataatgcacgaagaaggaaaccgcaacaagaggcaatttcatttggttcatcaaggctcgccacgatgttttacgatgcaaggcagcagacagatatttactttggccaatctccttttggccaagtgagaagcaatgcaatttcttcatgtgacaacctgggaggcttcaaatttacagaagcaaaactcccctggatgaagccaatgaaaactataggccttgaggatctgaatttctctaccctgcagatgccaggcaatgttgtgtcgcatacggtgcatcatcatgattttgatgggctcataccattcaagggaaacaccccgaaggtcctcaaccaaggtgtggatccagcctgtgccgtcgtgtcctccaactcgaatggagccccggatcttcggcgtgctctctctcttctgtcaagcgattcctggggcccggccgacgttcaggccggctcccaggtgcatcccggtggagtgatgccgcccctcgccgttgccgccgccaccgtcaccgccccgacgaaccctgtcagtgtgatgcatgctctgcacccgtccaccggaggaggaggattctggcaagacggcgacgacccgcctccgctcgatcatgcctcgcaggctcaggcgttcatgcatcctggcaatggcagcagctccggctatggccatctgcactga

SEQ ID NO: 439 - protein, 475 aa, Oryza sativa
MASFGMNWNQKSPVFWDWENPAPFGPNTMENPKSIPHPEPRGVVVAAANHGSTNSSGGTFTSSSELANGSSKSSLSASFDSSSKLGNSLEFRFASVKGHGKNMCKDGEAGRVEDSGTSPAVAVSHGEPVIGLKLGKRTYFENVCGGQNVKSSSAASGVTCPSTVVKKMKVSQQSTQSSYCQVEGCKVDLSSAREYHRKHKVCEAHSKAPKVIVSGLERRFCQQCSRFHGLAEFDQKKKSCRRRLSDHNARRRKPQQEAISFGSSRLATMFYDARQQTDIYFGQSPFGQVRSNAISSCDNLGGFKFTEAKLPWMKPMKTIGLEDLNFSTLQMPGNVVSHTVHHHDFDGLIPFKGNTPKVLNQGVDPACAVVSSNSNGAPDLRRALSLLSSDSWGPADVQAGSQVHPGGVMPPLAVAAATVTAPTNPVSVMHALHPSTGGGGFWQDGDDPPPLDHASQAQAFMHPGNGSSSGYGHLH

SEQ ID NO: 440 - DNA, 1155 bp, Populus spp.
atgagttctgtctcactgatggagtggaatggcaaaccccacttgcagtgggactgggaaaacctgataatgttcaatgcaataacaaatgaaaattcaaagcagttaagcctaacagatttggaaactgatggagaaaaaggaaatgattctgggtttttctattcatctgggagtgtaagcagaagccgtggatctatctctgacttagaacttgcttctttctcaaagagctcgaagtcagcttccaccaattcttcatcagctggggaagttaaaacatccaaattcactttgggggcctctaaaacaaatccatcagattacaataaggaagaacttgtgaaggctaaggcaactgatacttctcccacgcttgaagcttcagttggttcaggtgaccagctgcttggtttgaagcttggtaaaagaacttactttgaagatgcttgtgctgggagcaatgctcagtcttcatcaatatctacgattcctgtgccttcttttactccagcaaagaaattgaagtccagtaatcatagtcagcgtgctccacgctgtcaagtagaaggctgtaaccttgacctctcatcagctaaagattaccatcgcaaacatagagtttgtgaaagccattcaaagtgcccaaaggtcattgtagctggtttggaacgcaggttttgccagcagtgtagcaggttccatggtctgtcagagtttgatgaaaagaagaaaagctgccgcaggcgactttctgatcacaatgcaagacgccgcaaacagccaggatctgtccatttgaatccttcaagactttcttcatcattatatgatgagaggcaacagatgagtcatgtttgggacaaggcgccacttgttcattccaggcccaatgcaaatttgacatgggaaagcacatccacctccaagttcacaataacaaaagagtatatagcaaagcctgcagaaataggtggtagtgataggaggctccacttgcctggcattgatctgacaaatagcattgctattcagcaccatcataagtctaatggcttcttaccatccaaggccaagggcactgcaggtgaggttctcaaccaaggtttgttttgtcttcattttgagaaacaagcctcacaattattgcattga

SEQ ID NO: 441 - protein, 384 aa, Populus spp.
MSSVSLMEWNGKPHLQWDWENLIMFNAITNENSKQLSLTDLETDGEKGNDSGFFYSSGSVSRSRGSISDLELASFSKSSKSASTNSSSAGEVKTSKFTLGASKTNPSDYNKEELVKAKATDTSPTLEASVGSGDQLLGLKLGKRTYFEDACAGSNAQSSSISTIPVPSFTPAKKLKSSNHSQRAPRCQVEGCNLDLSSAKDYHRKHRVCESHSKCPKVIVAGLERRFCQQCSRFHGLSEFDEKKKSCRRRLSDHNARRRKQPGSVHLNPSRLSSSLYDERQQMSHVWDKAPLVHSRPNANLTWESTSTSKFTITKEYIAKPAEIGGSDRRLHLPGIDLTNSIAIQHHHKSNGFLPSKAKGTAGEVLNQGLFCLHFEKQASQLLH

SEQ ID NO: 442 - DNA, 1398 bp, Populus spp.
atggagtggaatggcaaaccccacttacagtgggactgggagagcctgataatgttcaatggaataacaactgaaaattctaagcagttaagcccaacagatttggaaactgatggagaaaaaggaaccgactctgggtttttctattcatctgggagtgcaagcagaagcggtggttctagctctgatttggaacttgcttctttctcaaagtgctcgaagtcagcttccatcaattcttcatcagctggggaagttaaaacatccaaattcactttggaggcctctaaagcaaatccatctgattacaataagaaagaaattggaaaggctaagacagctagtatgtcttccacaattgaggctgcaggtggttcaggtgaccagctgcttggtttgaagcttggtaaacgaatatactttgaagatgcttgtgctggcaacaatgttcagtcgtcatcattttctacagttcctgtgccctcttttacttcagcaaagaaattgaagtccactattcagagtcagcgtgctccatgctgtcaagtggaaggctgtaaccttgacctctcatcagctaaagattatcatcgcaaacatagagtttgtgaaagccattcaaagtgccagaaggtcattgtagctggtttggaacgcaggttttgccagcagtgtagcagtaagattattcctagcttttatgattgcattgacaatttgggttttggatgtcaaaggttccatggcctgtcagagttcgatgaaaagaagaaaagctgtcgcaggcgactttctgatcacaatgcaagacgccgcaaacaaccaggatcggtccatttaaattcaagagtgtcttcatcattatatgatgaaaggcaacagatgagtcttgcttgggacagggcaccacttgttcatgccaggcctaatgcaaatttgacgtgggaaggcacatacatctccaagttcacaataacaaaagattatatagcaaagcctgcagaaataggtggtaatgatgggcagtttcacttgcctggctttgatctgacaaatggcattgatattcagcaccatcataagtctaatagctccttaccatctaaaggtaagggcactgcagctgagattctcaaccaaggtttggaagaatacatcattccttccaaagcggaagcagcaccagaatctcatcgtgctctctctcttctgtcaaacaattcatggggttcacgtgagccgcaatctatttcatttgaacaacccgtgcatacaaatcacaccactcagtctgtgctgcaagttataccccaaaactcaccacttgcttcatcagagtattggaggactgagcaaccgtcaactgactctcaagtgcataccttgacgtctcactga

SEQ ID NO: 443 - protein, 465 aa, Populus spp.
MEWNGKPHLQWDWESLIMFNGITTENSKQLSPTDLETDGEKGTDSGFFYSSGSASRSGGSSSDLELASFSKCSKSASINSSSAGEVKTSKFTLEASKANPSDYNKKEIGKAKTASMSSTIEAAGGSGDQLLGLKLGKRIYFEDACAGNNVQSSSFSTVPVPSFTSAKKLKSTIQSQRAPCCQVEGCNLDLSSAKDYHRKHRVCESHSKCQKVIVAGLERRFCQQCSSKIIPSFYDCIDNLGFGCQRFHGLSEFDEKKKSCRRRLSDHNARRRKQPGSVHLNSRVSSSLYDERQQMSLAWDRAPLVHARPNANLTWEGTYISKFTITKDYIAKPAEIGGNDGQFHLPGFDLTNGIDIQHHHKSNSSLPSKGKGTAAEILNQGLEEYIIPSKAEAAPESHRALSLLSNNSWGSREPQSISFEQPVHTNHTTQSVLQVIPQNSPLASSEYWRTEQPSTDSQVHTLTSH

SEQ ID NO: 444 - DNA, 1419 bp, Populus spp.
atggactggaactccactgcatctgaggggaactgggagaacatagcagggttaagtgccaaggctagtgacattccaaaacaagtaccattggcataccatgagacagagggagatggagcaattgataaagcaataacttattcgtctggtggtggtttatcaagctctgatttgtggcattgctcttcatccaagagctcagtttcaccctctgtcgactcttcattgaagggggggatcaagacttatagcactgcagatggttttcctggagttatcattagaaaggacttgactagggtagaaagtactgagaatattccatctctgggtgcttctgctagctctggtgaaccagtaattggcttgaagcttggtaaacggatgtactttgaagacatttgtactaccagcactgccaaatcatcgtcttcatctattgtttccacttcctgtactgctacaacaaagagatctagggcatcatatccaagtacacagtctccacgttgccaagtggaaggatgcaaccttgatctcaagtcagctaaagattaccatcgcaggcatagaatctgtgaaaaacattccaaaagcccaaaggttattgttgctggcatggaacgccgattttgccaacagtgcagcaggttccatgaattatcagagtttgatgacaagaagcgaagctgtcgtagacgtctctctgatcacaatgcaaggcgacggaggccacaacctgaggcaatccggttcaattcagcaaggccatcatcatcaccatcatcattttatggttgtcatttcaatttcaaagatggtagacagcagatgaatgttgtattgaatagggtgcctttcctggcaggaaattcaacttggcaaagcgagtgcggctttaaagtcactcacgccggagatttttttattaggcctgcaaaagcagggggcatccataggcagcttagctatccctgcaatgaagtgccagatgcagcttcaacaataccaacagactcggataaaattatctcttttgagagaagtacaccccaggtctttagtcaaggtttcgaggggtctgcattaacttctaacattgaggtagcaccagatcttcggcgtgctctctctcttctgtcaaccacttcttggggctcgaatgagcatggatccacctctctggatcaactgatgcttgcaaaccaaacaagcatgacacagccaatgataaatgctgaactccaaaattgtccagttgcttcatcagaaaatgcacggatggaacaagcatcccttgagtctcgggtgcattctttggatttacatgacaatggaaacgtccagttgcaagagtttcagctgctcaaagcaccctatgctaccggctgcttttattccaatcaattcagctaa

SEQ ID NO: 445 - protein, 472 aa, Populus spp.
MDWNSTASEGNWENIAGLSAKASDIPKQVPLAYHETEGDGAIDKAITYSSGGGLSSSDLWHCSSSKSSVSPSVDSSLKGGIKTYSTADGFPGVIIRKDLTRVESTENIPSLGASASSGEPVIGLKLGKRMYFEDICTTSTAKSSSSSIVSTSCTATTKRSRASYPSTQSPRCQVEGCNLDLKSAKDYHRRHRICEKHSKSPKVIVAGMERRFCQQCSRFHELSEFDDKKRSCRRRLSDHNARRRRPQPEAIRFNSARPSSSPSSFYGCHFNFKDGRQQMNVVLNRVPFLAGNSTWQSECGFKVTHAGDFFIRPAKAGGIHRQLSYPCNEVPDAASTIPTDSDKIISFERSTPQVFSQGFEGSALTSNIEVAPDLRRALSLLSTTSWGSNEHGSTSLDQLMLANQTSMTQPMINAELQNCPVASSENARMEQASLESRVHSLDLHDNGNVQLQEFQLLKAPYATGCFYSNQFS

SEQ ID NO: 446 - DNA, 2042 bp, Brassica rapa
atggagtgtaatgcaaagccatcattgcagtgggagtgggataatctaatatcttttggtacttcatcagctgaaattcctaaaaagcaacgaccaatggattgggaaaatgatgggtttgattgcaccactttttactcgtccagctttgctacagaagcagcttatggtggtggtagttcaggttctgatctagctcatgctttctctaaaagctcaaagtcaacttccataagctcttcatcagctgaagtgagaacatacaatttcacatcagaagctggtgaaagtgttcctcctggagaattggggagcagtgaagagtttgcaatgggaattgatgcttctccaagtcttgaactctccttcggctctggtgatccggttcttggtttgaagcttggtaagaggacatactttgaagacttttgggaagtggagaatgctaaaggttcagcacttccggtgagcctggcgtcatcttctgcttctccggtgaagaaatccaaaacactctctcagaaattacaaactcctcactgccaagttgaaggctgtaacctcgatctctcctcagctaaggactatcataggaaacacaggatttgtgaaaaccattcaaagttccctaaagtcgttgtcagtggcgtagagcgccggttctgccaacaatgtagcaggtagaaaagctagtcttagagatattggtttatacaaaagccttaatgactttttttaattgtttttggtcttcaaaggtttcactgtctctctgagtttgatgagaagaaacgtagctgtcgccggcgtctctcagatcacaatgcaagacgtcgcaagccaaatcccgggaggacatatggtaatatactagattcacttctctctaatcctatatattaaatctaaatttttagttatataattagtaggtttcccttttctaagataaatatcattctgtatgtgcagatgggaagcaacagatggattttgtatggaacagatttgcacttatccatccaagaagtgaagaaaattttctgtggccaaatccgaagcctgtatcatcaagagggttattgcaggaacctgcaaagaccgagatgcccaataagcttttcaccgagcattgtggatttggattgttggaccccaaaacgaaaaccaccagagctgagttattcagtaaaggtttgtgtttttctttgctgtttaatatattttctcttgttgtattcatgatcttgatgattgcttgttttatgcagatttgttagaaaaggtcacaatctcttcttcacacatgggtgcttctcaagatcttgatggtgctctctctcttctgtcaaattcaacaccatgggtttcctcgaaccagccaacacggttttcccttaaccaccattccacaagcaacctccaacccgtggttcacgggtctgtgactcaactcagttcagtgtccagctactggcagccggacccaccagcagctgagggctcaaccgctttgactaggaatggggtaggccagtttaatgagaactacaacttgaatcagttttataactgaaagtgtgttgcttttaaaatcataataagatattttgtgtaaggatcaggtgagcctagtggtaacgtttaaataggagctgtgaaacttgctaaagacatcaactcctctcgtctttcttttgtccattgattttcttgggttagggagagttgtgacagttaagtattataaatcatcttgtcaaattatttatacattagaattttcagatattgatggtgtagcaactgaaaaattgatcaaacgcatcataatatacgtatgataaggttatttgcatctgaactttttttatattcgcattagtcagcattttgtgttatactagatttggatccgtgcgttgcaacaggttttatttgatattaccatccattgatttttttttttttttgcaaacaaataatttggtaattccattaaccgccacagtcgttttctgagcaaaaccatgttaaaatct

SEQ ID NO: 447 - protein, 282 aa, Brassica rapa
MECNAKPSLQWEWDNLISFGTSSAEIPKKQRPMDWENDGFDCTTFYSSSFATEAAYGGGSSGSDLAHAFSKSSKSTSISSSSAEVRTYNFTSEAGESVPPGELGSSEEFAMGIDASPSLELSFGSGDPVLGLKLGKRTYFEDFWEVENAKGSALPVSLASSSASPVKKSKTLSQKLQTPHCQVEGCNLDLSSAKDYHRKHRICENHSKFPKVVVSGVERRFCQQCSRKSSRYWFIQKPLFLIVFGLQRFHCLSEFDEKKRSCRRRLSDHNARRRKPNPGRTY

SEQ ID NO: 448 - DNA, 1684 bp, Zea mays
agccgcttcggcaggcaagtaggacgaggagcagcagctcagatttcggatcctggcactggcaactggcatgggctcgtttgggatggacatggactggaaccagaaggcctccgtgctgctgtgggactgggagaacctgccgcccgcagccgcaaacgggagcgagagccacaggacgaccgctgccgcgcctcagttcgcgggccttgaggccacagggcatgaaccggcgccttcttccgtatcctcgtcaatccattctctgcccagtgccaaggggaacaagaacaagaacaacatggagctcatcagtttcgcacctgccaaagcgcccgacaaggacactggttcggtgctcagcagcggagagccggtggtgctaggcctgaagcttggcaagagaacgtatttcgaagatggttgtggactagggcagagcggcaagagttcggcggcgttaggcactgccagtgcagcgacccctccgggtcctgcgaagaaggcgaaggcggcggcggcggctccaaccgcgcagcagcagaaatcgtactgccaggttgaaggctgcaggaccgatctgtcctctgctaaagactatcatcgcaagcacagagtctgcgagccccattccaaggcgcccaaggtggtcgtcgctggcctggagcggcgcttctgccagcagtgcagccggttccatggactggccgagttcgaccagaagaagaagagctgccgcaggcgactcaacgaccacaacgcgcgcaggcggaagccccagcccgaagcgctccctttcggctcatcgaggctgtcggcgatgttctatgacacgaggcgccaggcgagcctcctgtttggtgaaggtccctacggtcagatgagaagctgtgcgagttcttggtgggatagcccaggagcaggaggaggaggcttcaaattcgcggagacgagaggagctccttggttgaagccggcgagagctgctgctgatgggctgctgcctttgtcaggtcagcagcagcagcaggtgtggaatgactcgattccgcatgttgcccatcaggaggatttcgatgggttcacggtcacggcgttcaaaggaatcagtccaaagacccttgatcatcaaggcgcaggcgttgaagcctgtgcggccgtctccagcccggacggcgccccggaccttcagcgtgctctctctcttctgtcaaacagtccggccggtggcggcggcaccaacaccaaccacccgccgccgccgccggcggctgagctgcaccaccaccgcgctgccccgagcagctgcctcgccgccggctccgtctccgtgctgcaggaggcctcgtcgccggggctgtggcaggacggcggcggcagcgcggccctgggccaccacgcgcacgcgcggctccaggctctcgacgccgccatggcgacggcgcaggagctcctccagctccccaggccgccgccatcgtacggcggctcctcgtcccactacgacctgatgcgctgatgcttccttccttgtggattgtggtggagaactggagatggagcgggagcgccgccgtgcccccggttggcgcgtggaaatcagtcagacgtggcttctgtggcgtcgtctctgcaacgcgggagcgggattttgcttgtgttctgaacgaacagaaaaaaaaaa

SEQ ID NO: 449 - protein, 482 aa, Zea mays
MGSFGMDMDWNQKASVLLWDWENLPPAAANGSESHRTTAAAPQFAGLEATGHEPAPSSVSSSIHSLPSAKGNKNKNNMELISFAPAKAPDKDTGSVLSSGEPVVLGLKLGKRTYFEDGCGLGQSGKSSAALGTASAATPPGPAKKAKAAAAAPTAQQQKSYCQVEGCRTDLSSAKDYHRKHRVCEPHSKAPKVVVAGLERRFCQQCSRFHGLAEFDQKKKSCRRRLNDHNARRRKPQPEALPFGSSRLSAMFYDTRRQASLLFGEGPYGQMRSCASSWWDSPGAGGGGFKFAETRGAPWLKPARAAADGLLPLSGQQQQQVWNDSIPHVAHQEDFDGFTVTAFKGISPKTLDHQGAGVEACAAVSSPDGAPDLQRALSLLSNSPAGGGGTNTNHPPPPPAAELHHHRAAPSSCLAAGSVSVLQEASSPGLWQDGGGSAALGHHAHARLQALDAAMATAQELLQLPRPPPSYGGSSSHYDLMR

SEQ ID NO: 450 - DNA, 1320 bp, Zea mays
atgggttcttttgggatgaactggaatcagaaggaccccatggtgtgggattgggaacatctagtaccgtctgtctcaaatgcagttacaaggcacggatctgctaattcatctggtggtactcttacttctaactcagagctagggcatggttcatccaagagctctatttcagcgtccattgattcaccctctggagtagggaacagcttagagttcaacttcgccgctgttgagaggcatgttaagaacacgggcacgaacggcagagtcgatgactcggggaattctccatcgtcaatgatagctttcaaccaaggagagccattaatcagcctgaaacttgggaagagggcttacttcgaaaacgcctgcggaggacaggatgccaaggtttctgcagcttcagacgttacttctgcagccagcgtggtcaagaagactaaggtgtctcagcagaatgcaaagaactggtactgtcaggttgaagggtgcaaagttgacctgtcttctgctaaagattacaatcgcaagcacaaggtctgtgtagtccattctaaagctaccaaggtggttgttgctggtctagagcgtcggttttgtcaacagtgtagccgttttcatggtttagcggagtttgatcagaacaaacgaagctgtcgtaggcgtctgatgcatcataatgcacggaggaggaaacctcaggcagacacaatttcattcaattcatcgacaatgttttatgatacaaggcagcggacaaatcttttctttagtcaaccactttatggccaagtgaggagcaatgcagggtcttcatgggataacttgggaggcttaaaattcatggagacgaaacatccgccagtgcatccaacaaaaacagcatcccctgatgaactgcatttctcagccctccagataactagtgctgcggctcacaccggacatcatcatgatctcgatgggttcatggcgttcaagggaaccagcacaaaggtccttaaccaaggcgtggaggcttgggcggccgcttccagctcgaacaacggaggcccagaaggtgggcgtgctctctctcttctgtcagacggctcgtggggctcgagttcagccgtcatccagcagcccacatctcacgcggacgccggtgcattgctgccgcccctcgccaccgttgccgtctccaacgccgccgccgccgccgggcatcctctggacccgtccccgggaaggttctggccgcaagacgatcatcccccgctcgtcgacggacccgccacgcagattccggagctggcgcacctccggatatggtga

SEQ ID NO: 451 - protein, 439 aa, Zea mays
MGSFGMNWNQKDPMVWDWEHLVPSVSNAVTRHGSANSSGGTLTSNSELGHGSSKSSISASIDSPSGVGNSLEFNFAAVERHVKNTGTNGRVDDSGNSPSSMIAFNQGEPLISLKLGKRAYFENACGGQDAKVSAASDVTSAASVVKKTKVSQQNAKNWYCQVEGCKVDLSSAKDYNRKHKVCVVHSKATKVVVAGLERRFCQQCSRFHGLAEFDQNKRSCRRRLMHHNARRRKPQADTISFNSSTMFYDTRQRTNLFFSQPLYGQVRSNAGSSWDNLGGLKFMETKHPPVHPTKTASPDELHFSALQITSAAAHTGHHHDLDGFMAFKGTSTKVLNQGVEAWAAASSSNNGGPEGGRALSLLSDGSWGSSSAVIQQPTSHADAGALLPPLATVAVSNAAAAAGHPLDPSPGRFWPQDDHPPLVDGPATQIPELAHLRIW

SEQ ID NO: 452 - DNA, 1422 bp, Triticum aestivum
atgggctcgttcgggatggagtggaaccagaggagctcggtgctgtgggactgggagaatttcccgccgataggcgagaaccccaagaacgcgatgcaggccgatccaagatttgccgccgttgcggctaccatggggaatgaaccgctccattcttctggcggtagcggcaccttctcttccagctcagagatggggtatggctcttccaagagctccatgtccgcgtcgatcgattcttcgaacagggctgggaacaacatggagttcagatttgcgcctgtcaaaaaccctgataggaacacgagcaagaacaccgagctgggtaaagttgataacacgagaactggaacatctccgtcgcctgtggtggcagtgagcagtggagagccggtgatcggcctgaagcttggcaagagaacttacttcgaggatgtctgtggagggcagaatgtcaagagctcgccatcgggtgctgcgagcgcgccaaacaaatctcctgctttgggcaagaaggcaaaggcggaacaacagaagccacataactcgtactgtcaggttgaaggctgcaaagtcgacctctcttctgttaaagattaccatcgaaagcacagagtctgtgaacttcactctaaggctccgaaagttgttgtcgctggtctggagcgacgcttttgccaacagtgcagccggtttcatgctttagctgagtttgaccagaaaaagcgaagctgccgtaggcgtctcaatgatcataattcccgcaggcggaagccacagccagaagcaatttctttcagttcatcaaggatgtctacgatgttttatgatgcaaggcaacagccaaatttcctatttggtcaggctccttatgttcaaatgagaagctgtggaagttcttcatgggatgacccaggaggcttcaaagttacacacacaaaagctccttggttaaaaccaacaactgctgcaggtgttcatgggatacatttatctagtcagcagatgtcggacaatattatgccacatggtgcacatcatggtttcgatgggttcatggcattcaagggaacttgtacaaagttccctaatcaaggtgtccaagcttctgctgttgcttccgactccagtggagccccggatcttcagcatgctctctctcttctgtcaagcaacccagtgggtgctgccaacctccagccaagtccccagatgcactctggggtggcagccattgccggcgcccccaaccccgcgatgcacgcgctgggatcatcgacggggctctggctagacggcagccagcccctcgatgatcacccgcggttccaggtcttcgagcgcttgggggaccatgacagcgagctccagctcccaaagccttcctacgaccatgcctcgcacttcgaccggatgcactga

SEQ ID NO: 453 - protein, 473 aa, Triticum aestivum
MGSFGMEWNQRSSVLWDWENFPPIGENPKNAMQADPRFAAVAATMGNEPLHSSGGSGTFSSSSEMGYGSSKSSMSASIDSSNRAGNNMEFRFAPVKNPDRNTSKNTELGKVDNTRTGTSPSPVVAVSSGEPVIGLKLGKRTYFEDVCGGQNVKSSPSGAASAPNKSPALGKKAKAEQQKPHNSYCQVEGCKVDLSSVKDYHRKHRVCELHSKAPKVVVAGLERRFCQQCSRFHALAEFDQKKRSCRRRLNDHNSRRRKPQPEAISFSSSRMSTMFYDARQQPNFLFGQAPYVQMRSCGSSSWDDPGGFKVTHTKAPWLKPTTAAGVHGIHLSSQQMSDNIMPHGAHHGFDGFMAFKGTCTKFPNQGVQASAVASDSSGAPDLQHALSLLSSNPVGAANLQPSPQMHSGVAAIAGAPNPAMHALGSSTGLWLDGSQPLDDHPRFQVFERLGDHDSELQLPKPSYDHASHFDRMH

SEQ ID NO: 454 - DNA, 1491 bp, Vitis vinifera
atggatgctgttgttttgacaggtttggaagaatctggggtaagagtaagggtggttaattttatacagggcgggcgagaaatggcatttttgttggaatctgtgcaagaagaggacttgggtagaaacatcatcggttctacttggtcgacttggggaagaaaggacaatcgatatccttctctaaaaggggataaggaatttcctttctgtggcatgtgggactgggagaaccttgacattttcaatgcaaaatcaactgaaattccaaaaaagttacaatcagactgggaaattgaaggagaaggaggaattgacactggttctttctattcatctggatgtggtgctggtagtggtggttctggctctgatttgggacatgcatattcatcaaagagctcaaaatcagcttcaattgattcttcatcaaaggtgggaataaagacatccaacttcacttttgaggctttccaagatttttctcaagattttaacaagaagagagatttggagagggctgagccaactggaagttctccaaaccttgaagcctcgattggctctggtgaacctttaattggtctaaagcttggtaaaaggacatacttcgaggatgtttctgcagggggcaatgctaagggctcagtgttttctgtgattcccatatcatctgataccacagcaaagagatccaggttatcttgtcagaatgcacatgtctcgcgctgccaagttgaaggatgcaaccttgacctttcaacagccaaagattaccatcgcaaacatagagtttgtgaaagtcataccaaatgcccaaaggtcattgtaggtggtctggagcgccgtttttgccaacagtgtagcaggttccatagtttgtcagagtttgatgaaaagaagagaagctgtcgcaggcgtctttctgatcacaatgcacgccggcgcaaaccacaaccagaagggatccagtcaaattcggcgaggctttcatcattctatggtgggaagcagcaaatgagtcttgtgttgagctcggtccccattgttcatacaaggcctgctgtaaatccttcatgggaaggcacatgcagcaagttcacacaaacaaaagggttagtaaggcctggtaacacaggaggtatcgaccggcagctgcatttgcctggcagtgagctgcagaatggcattagtacgctttgtcatgattccagtaggcttttgcactctaagggcgcaatagctgaggttctcaatcaagtgtcccaaggtatgttacattcaacctcagaacactggaggaccgagcttccctcaactgattcccgggtgcatatcttgccttcacaaggcgatggtaacacccactttcaagagttcaagctgttcaaagcgccatacgagtctggcttttcttctggatattcagagtatagggaattgagatatccgattcctaggagtaacgcccgtgtcatgaagcaaacatag

SEQ ID NO: 455 - protein, 496 aa, Vitis vinifera
MDAVVLTGLEESGVRVRVVNFIQGGREMAFLLESVQEEDLGRNIIGSTWSTWGRKDNRYPSLKGDKEFPFCGMWDWENLDIFNAKSTEIPKKLQSDWEIEGEGGIDTGSFYSSGCGAGSGGSGSDLGHAYSSKSSKSASIDSSSKVGIKTSNFTFEAFQDFSQDFNKKRDLERAEPTGSSPNLEASIGSGEPLIGLKLGKRTYFEDVSAGGNAKGSVFSVIPISSDTTAKRSRLSCQNAHVSRCQVEGCNLDLSTAKDYHRKHRVCESHTKCPKVIVGGLERRFCQQCSRFHSLSEFDEKKRSCRRRLSDHNARRRKPQPEGIQSNSARLSSFYGGKQQMSLVLSSVPIVHTRPAVNPSWEGTCSKFTQTKGLVRPGNTGGIDRQLHLPGSELQNGISTLCHDSSRLLHSKGAIAEVLNQVSQGMLHSTSEHWRTELPSTDSRVHILPSQGDGNTHFQEFKLFKAPYESGFSSGYSEYRELRYPIPRSNARVMKQT

SEQ ID NO: 456 - protein, 79 aa, Artificial sequence
  sbp domain of SEQ ID NO: 2
RCQIDGCELDLSSAKGYHRKHKVCEKHSKCPKVSVSGLERRFCQQCSRFHAVSEFDEKKRSCRKRLSHHNARRRKPQGV

SEQ ID NO: 457 - protein, 79 aa, Artificial sequence
  sbp domain of SEQ ID NO: 7
RCQIDGCELDLSSSKDYHRKHRVCETHSKCPKVVVSGLERRFCQQCSRFHAVSEFDEKKRSCRKRLSHHNARRRKPQGV

SEQ ID NO: 458 - protein, 79 aa, Artificial sequence
  sbp domain of SEQ ID NO: 9
HCQVEGCNLDLSSAKDYHRKHRICENHSKFPKVVVSGVERRFCQQCSRFHCLSEFDEKKRSCRRRLSDHNARRRKPNPG

SEQ ID NO: 459 - protein, 79 aa, Artificial sequence
  sbp domain of SEQ ID NO: 11
HCQVEGCNVDLSSAKPYHRKHRVCEPHSKTLKVIVAGLERRFCQQCSRFHGLAEFDQKKRSCRRRLHDHNARRRKPQPE

SEQ ID NO: 460 - protein, 79 aa, Artificial sequence
  sbp domain of SEQ ID NO: 13
YCQVEGCKVDLSSAREYHRKHKVCEAHSKAPKVIVSGLERRFCQQCSRFHGLAEFDQKKKSCRRRLSDHNARRRKPQQE

SEQ ID NO: 461 - protein, 108 aa, Artificial sequence
  sbp domain of SEQ ID NO: 15
TPAKKLKSSNHSQRAPRCQVEGCNLDLSSAKDYHRKHRVCESHSKCPKVIVAGLERRFCQQCSRFHGLSEFDEKKKSCRRRLSDHNARRRKQPGSVHLNPSRLSSSLY

SEQ ID NO: 462 - protein, 98 aa, Artificial sequence
  sbp domain of SEQ ID NO: 17
CCQVEGCNLDLSSAKDYHRKHRVCESHSKCQKVIVAGLERRFCQQCSSKIIPSFYDCIDNLGFGCQRFHGLSEFDEKKKSCRRRLSDHNARRRKQPGS

SEQ ID NO: 463 - protein, 98 aa, Artificial sequence
  sbp domain of SEQ ID NO: 19
DLKSAKDYHRRHRICEKHSKSPKVIVAGMERRFCQQCSRFHELSEFDDKKRSCRRRLSDHNARRRRPQPEAIRFNSARPSSSPSSFYGCHFNFKDGRQ

SEQ ID NO: 464 - protein, 79 aa, Artificial sequence
  sbp domain of SEQ ID NO: 21
TLSQKLQTPHCQVEGCNLDLSSAKDYHRKHRICENHSKFPKVVVSGVERRFCQQCSRKSSRYWFIQKPLFLIVFGLQRF

SEQ ID NO: 465 - protein, 82 aa, Artificial sequence
  sbp domain of SEQ ID NO: 23
SYCQVEGCRTDLSSAKDYHRKHRVCEPHSKAPKVVVAGLERRFCQQCSRFHGLAEFDQKKKSCRRRLNDHNARRRKPQPEAL

SEQ ID NO: 466 - protein, 75 aa, Artificial sequence
  sbp domain of SEQ ID NO: 25
CQVEGCKVDLSSAKDYNRKHKVCVVHSKATKVVVAGLERRFCQQCSRFHGLAEFDQNKRSCRRRLMHHNARRRKP

SEQ ID NO: 467 - protein, 85 aa, Artificial sequence
  sbp domain of SEQ ID NO: 27
YCQVEGCKVDLSSVKDYHRKHRVCELHSKAPKVVVAGLERRFCQQCSRFHALAEFDQKKRSCRRRLNDHNSRRRKPQPEAISFSS

SEQ ID NO: 468 - protein, 81 aa, Artificial sequence
  sbp domain of SEQ ID NO: 29
RCQVEGCNLDLSTAKDYHRKHRVCESHTKCPKVIVGGLERRFCQQCSRFHSLSEFDEKKRSCRRRLSDHNARRRKPQPEGI

SEQ ID NO: 469 - protein, 6 aa, Artificial sequence
  motif 1
WDWENL

SEQ ID NO: 470 - protein, 12 aa, Artificial sequence
  motif 2
SKSSQSTSINSS

SEQ ID NO: 471 - protein, 7 aa, Artificial sequence
  motif 3
ALSLLST

SEQ ID NO: 472 - protein, 6 aa, Artificial sequence
  motif 4
LKLGKR

SEQ ID NO: 473 - DNA, 56 bp, Artificial sequence; identical to SEQ ID NO: 177
  primer 1

SEQ ID NO: 474 - DNA, 54 bp, Artificial sequence; identical to SEQ ID NO: 178
  primer 2

SEQ ID NO: 475 - DNA, 9 bp, Artificial sequence
  promoter box
  misc_feature (2)..(2): n is a, c, g, or t
tncgtacaa

SEQ ID NO: 476 - DNA, 2194 bp, Oryza sativa; identical to SEQ ID NO: 10

SEQ ID NO: 477 - DNA, 1827 bp, Oryza sativa
gcttgagtcatagggagaaaacaaatcgatcatatttgactcttttccctccatctctcttaccggcaaaaaaagtagtactggtttatatgtaaagtaagattctttaattatgtgagatccggcttaatgcttttcttttgtcacatatactgcattgcaacaattgccatatattcacttctgccatcccattatatagcaactcaagaatggattgatatatcccctattactaatctagacatgttaaggctgagttgggcagtccatcttcccaacccaccaccttcgtttttcgcgcacatacttttcaaactactaaatggtgtgttttttaaaaatattttcaatacaaaagttgctttaaaaaattatattgatccatttttttaaaaaaaatagctaatacttaattaatcacgtgttaaaagaccgctccgttttgcgtgcaggagggataggttcacatcctgcattaccgaacacagcctaaatcttgttgtctagattcgtagtactggatatattaaatcatgttctaagttactatatactgagatgaatagaataagtaaaattagacccaccttaagtcttgatgaagttactactagctgcgtttgggaggacttcccaaaaaaaaaagtattagccattagcacgtgattaattaagtactagtttaaaaaacttaaaaaataaattaatatgattctcttaagtaactctcctatagaaaacttttacaaaattacaccgtttaatagtttggaaaatatgtcagtaaaaaataagagagtagaagttatgaaagttagaaaaagaattgttttagtagtatacagttataaactattccctctgttctaaaacataagggattatggatggattcgacatgtaccagtaccatgaatcgaatccagacaagttttttatgcatatttattctactataatatatcacatctgctctaaatatcttatatttcgaggtggagactgtcgctatgtttttctgcccgttgctaagcacacgccacccccgatgcggggacgcctctggccttcttgccacgataattgaatggaacttccacattcagattcgataggtgaccgtcgactccaagtgctttgcacaaaacaactccggcctcccggccaccagtcacacgactcacggcactaccacccctgactccctgaggcggacctgccactgttctgcatgcgaagctatctaaaattctgaagcaaagaaagcacagcacatgctccgggacacgcgccacccggcggaaaagggctcggtgtggcgatctcacagccgcatatcgcatttcacaagccgcccatctccaccggcttcacgaggctcatcgcggcacgaccgcgcacggaacgcacgcggccgacccgcgcgcctcgatgcgcgagcccatccgccgcgtcctccctttgcctttgccgctatcctctcggtcgtatcccgtttctctgtcttttgctccccggcgcgcgccagttcggagtaccagcgaaacccggacacctggtacacctccgccggccacaacgcgtgtccccctacgtggccgcgcagcacatgcccatgcgcgacacgtgcacctcctcatccaaactctcaagtctcaacggtcctataaatgcacggatagcctcaagctgctcgtcacaaggcaagaggcaagaggcaagagcatccgtattaaccagccttttgagacttgagagtgtgtgtgactcgatccagcgtagtttcagttcgtgtgttggtgagtgattccagccaagtttgcg

SEQ ID NO: 478 - protein, 100 aa, Artificial sequence
  consensu sbp domain on SPL11 polypeptides
  UNSURE (26)..(26): Xaa can be any naturally occurring amino acid
  UNSURE (30)..(30): Xaa can be any naturally occurring amino acid
  UNSURE (49)..(69): Xaa can be any naturally occurring amino acid or a gap
HCQVEGCNLDLSSAKDYHRKHRVCEXHSKXPKVIVAGLERRFCQQCSRXXXXXXXXXXXXXXXXXXXXXFHGLSEFDEKKRSCRRRLSDHNARRRKPQPE
